United States Patent Application Publication US 2026/0191916 A1 - sequence listing, part 28

SEQ ID NO: 78 - DNA, 401275 bp, Gordonibacter urolithinfaciens
  source 1..401275: mol_type = genomic DNA
gcgggggcaggcggcggcgcaggagggcttcggccttcgataatgcaacggtgggactacttcaagagggcgcgggaaataaggccccagggattcacctatactagtaagggcaacaaagagcgacgcagggaaaagtaaggcgggcaagggcgctccccgcagggagcattggcgggataggaggtcggcatggaggcacccggacaacttggcgacgagctggcagagcgggggcaggcttgcagcgctacccctggaggcccatgccccgtcacgatccccctgcccccgcaggccgccttcgccctcgctgcgctcgaggaagccggcttcgaggcatggtgcgtgggcggcttcgtgcgcgatgcgctgctcgggcgggcgtgcgccgacgtcgacgtggccaccgacgcgccctggcaggaggtgcagcgtgtgttcgaggcggccggctgccgcacgcacgagacgggcacggcgcacggcacgctcaccgtagtagtggagcaagaggcgctggagatcacgacctaccgggacgacggcgcctacgcggacgcgcggcaccccgaggccgtttccttcgtccgcaccatcgaggaggacctggcccgccgcgacttcactatgaacgcgctggcctaccatccaaaacgcggcatcctcgacccgtacggaggcgtggcggacctcgaagcacgcacgatacgcgccgtgggcgaccccgctcgccgcttctccgaggacgcgctgcgcatcctgcgggcatgtcggttcgcctcgcagctggggttctccatcgagcctgccacctacgccggcatgatggcgaacaagggccagcttctgcgcatatcggccgaacgggtgacgcacgagctggaatgcctgctcttgggcgcgcacgtgcatgacgctctcatgggcacggtggacgtgctggccgcggtgctgcccgagctggtggcgtgcaagggcttcgagcagcgcacgccctaccatgtatacgacgtgctcgagcacacggcgttcgtcgtgcagaacaccccgccctcccccctcgtgcgctgggcggcgctcttccacgatatggggaagccggcggcgttcttccaggatgcggacggcacggggcacttctacggccatgcgaagatcagcgtggagctggcacgggcggccatggggcggctcgcgctctcaccggccttcgtcgggcgcgtgctgacgttggtgaagcatcacgacgacgtgatagagcccacgccgaaagccgtgaagcgggccctcgcccgcctgggcggcgacgtagggctgttccgcgcgctctgcgacctgaagcgcggcgacgcgctcgcccaggcaccgcgatgcgcgggacgcgtggagctggccgacgagctcgaagaggtgctgggcgggatactggaggcgaacgaggccttcacgttgaggaagctcgccgtggacggccgcgacgtgatggcagccggcgtgcggcaggggccggccgtgggcgccgtgctcgctgcggcgctcgacgccgtgatcgacgagcgcatgccgaacgagcgcgcggccctgctggccttcgcagccgcctggctcgccgagcaggacggccgggatgcggcagagggcacgaagggcccggaacgcgccgcggacgaaaagcgggctgcgggcgcagggagcggcgccggcgacgtggcaggcgcctaacggttgacccacctgcctgcaacgacgccgccggacggcgccggggccgcggcgggcgctcctatactgacgggataccgagaccccgataggaagcgaggcgccatggcaacgatgacgcaggagcgcaccgagcgcgagacgacccggcaggcccagccgggagacgcgccccagacccagggcgagacgcccacccccatgagcatcaccatcgtggagaacggcccgtacgtggtcaacggctccgtgccgctgctcgaggaggtcatcacgccggtgggcggccatcgcgagtaccgcgtgcgccgcacgttccccgccacgcaaacctatgcgctctgccgctgcgggcgcacgaagacgccgccgttctgcgacggctcgcacgtcacggccgacttcgacggcaccgagacggccagccgcgagcccttcgaggagcgcgccgacgtctaccccggcccaggcgcgtacctgctcgacgacaaccgctgcgccttcgcgcgcttctgccaccgcgaggacggcgacgtgtggacgctcactgagctctcgggcgacgagcgcttgaaggaagaggcgataaaggcctcgtcggactgccccgccgggcggctcgtgcactacgaccccgccgacggcaccccctacgagcccgagctggatcccgcgatctcgcttctggaggaccccgaggagggcgtgagcggcccgctgtacgtgcgcgggggaatccccctgatcagctccgacggcagcacctacgagctgcgcaaccgctatgcgctctgccgctgcggggcgtcgcgcaacaagccgttctgcgatgccatgcacgtgagcatcgggttctcggacggcttggactgacggagcgccgcacggaagcgcggagcgcccgcaagcgccctgtcgcagcccggcaacgagcgcgcctcccggcccgctggcgggcaagttcgaaattttcaaaaaaagttgggctggggccttgacgaagtccatggctccccgtaatatatgcactcgcgcttgcgactgttgcaacaagcaacggaagcacatcggttagccgatggggtgtcgtctaatggcaggacagcggtttctggtaccgtatgtgagggttcgactccttccaccccagccatttttgcggtatactgcacagcgcactatgtggctccgtcgtctagcggtttaggacgccgccctctcaaggcggaggtcgccggttcgaatccggtcggagctaccaagcaacttgcaggccggggcatcagccccggcctttttgctatttcgccccgaggaaagggaggccgcatggatcgagcgaacacgggcacggcaaccccatcgagcatggccgtgccagacccggccgatgcctgcctggcggcgcccttcggcatgccggtagagctgcttccgaacctgtacctggtgcgcgtgccgctgccgcacaaccccctgcgcgcgctcaactcctacctgatcttgtcgaaggaccgcacgaccatcgtcgatgtgggcttcaaccaccccgcctgcgaggaggcgctcggccaggcgctcgccgccctgggacgcacctgggacggcgtggagatcgtgctgacccattcgcatcccgaccacacgggaaacctcgaccgcatctaccgcgacggcatgccggtcttcgcgaacctccactcgttccaagaggtggagaacctgcaggacatggaggcccgcgtgttcggccccctgctgctgaaggcggccacgccacaccagagcggcctgggctttggaaagggcaagcctacgctacacgtatcggccgagctgctgcctctgaagaaccagccggccgtgacgttcctgcacgagggcgacgtgctccgtgcggggccctatgcgttcgaggtgctggagacgcccgggcacgacccgtggcacctctgcctctacgagccgtcgcgcaggatactgttggcaggcgatcacgtgctcgagcgcatcacgccctcgatagcctcgtggttcccggcctacaacgccttggaggagttcctggcgagcttggggaaggtaagcaacctggatgtcgagcgggtgctgccgggccacggcgccgtgttcggcgatctgcgcgggcgcgccctgcacctcatcagccaccacgaggaacgccttcaggagatatacgacctggtggccgaggggcacggggacgtcgtatccatctcgtcgcacgcgaagtggcgctacgacaactggcgctcctggccgctcgaccagaagttcttctcgatgggcgagacgatggcgcacttggtgtacctggtttgcgaaggcaagctgaagcagacgatctgcggcgacgagtaccgcttcgagctgccgtagccggcggggcgcgatacggcatacggcgctgcgagacaaggagcataccatgcacatcgacctgatcatcgaaagcgagaacgtgttcaccgggaccgacgccgcgacgagacccgccgccgtcgccatctccggcgaccgcatcgtggccgtgggcccgcgagcggacgtgcacgccttcgcccgcgcgcgcaacgagggccccgcgcccgaggtgcgcgacttcggcgacgcgctcgtggtgcccggattccacgattcgcacctgcacttcttccattcggccgtgtacgcctcgcccttggcgaccatgttcctcggcgagaacgaagccgactgcgtcgatcgcatgcgggcgttcgccgccgagcgcccgaacggctggctgctggcgcagggatggcgcgagtaccggtgggatccccccgtgcttccctcgaagcgctcgctcgacgaggccttccccgcccgccccgtggcgctgtactcgggcgacgcccacacgctgtggctcaactcggcggcgctggccgagctggggctcacgcgcgacagcgttcccccggcgggcggctcctacgatcgcgacgaggcgggcgagctgaccggcatcgtgcgcgaggcggccgccatggagctgatgccgcagatcatgggatcgttcaccgacgaagaggtggcgagcgcctaccgcgggttcttcgcgcggctgggcgcgttcggcgtgacgagcgtctgcgatatgtcgctcatggcgcatccggggctcgacttcatccgcgacgacgtgcacgcggccctgctcgagcgcggcgagctgaccgcgcgcgtgcacctcttccccacgttgacgggcgacatgggccgcttcgagacgatgcgcgcgctctacacggggccgtgtttgcaggcaaccggcttcaagcagttcttcgacggcgtgtcgagccagcacacggcctgggtgaccgagccctacgccaacgcgcgcgtcgaaggcgactgcggccgccccacggtggacgccgccgtgatgcgctccttggtgctggccgccgccgagcggggctaccccgtgcgcatccacaccatcggcgacgcggccatccacgccgcgctcgacatcttcgaggaggcgcgggcgacgtacgggccgctgccggaagggcgccgcaactgcctcgagcacctggagaacttcctgcccgaggatctcggccgtctggccgagctgcaggtggtggccgccgtgcagccgccgcatatgacgctcgacccgggcggccccgagcgcgacctcggcggggagcgcgtgccttacatgtggccgttccgcacgctgctcgacacgagcgcggtgctggcgttcggcaccgattcgcccgtggtggacgtgaactcgatggacgtgctgtacagcgccgtgacgcggcaggacccgggcacgcacgagcccgccggcggctggctgcccgacgagcgcattggaatggcggaggccctgcgcgcctacacgcagggcagcgccgcggcggcggggcgccggcgcgagctgggcaccctcgagacgggcaagctggccgacatagccgtgctcgaccgcaacctgctggcttgcgatccggaggatatccagaagacgaaggtgctggccacgttcatgggcggccgctgcgtgttcgagcggtaggttcgggggaaggggacgccgcccccgtctcctcgcctcattcccacatatgatcgagcgggccgctgcccttccccaggtcgaggcccgaggcgagggcgccgtgcacgtaggccttagcgctgcgcaccgcttcctccatcggaaggcccttcgcgaggccgcaggcgatggccgacgagagcgtgcagccggtgccgtgggtgttctcggtttcgatgcgctccgctcgcaaccagagcgccggtgcgtccgcatgcgccacgagcacgtcgtcggcgcgcgcgaagctgtgaccgcccttcacgagcgcggcgccccgcacccgcccggccagctcgcgggcggcacgttccatggacgcgtcatcgtccaccgcgaacccgcacagcacctccgcctccggcatgttcggcgtgaccacgtccgcgaggggcagcaggcgcgccttcagggcctcgacggcgtcctcgcagatgaggcgcgcgccgctcgtggccaccatgacggggtcgaccacgatgttggccgccccgtggcgctcgagcgcgtcggcgacggcctcgatgacggcggccgacgacaccatgcccaccttcacggcggcggggcggatgtcctcgaacacggcgtcgatctgccgggatacgaaggccgggtcgacgtcgagcacgccggtcacgccgagggtgttctgcgccgtgagcgccgtgacggccgtctcggcgaacaggcgatgcgcggcgatggtcttgatgtcggcttggatgcccgcgccgccgctggaatccgaccccgcgatgctgagcactgcttccatgtcgttgtcctttcctcgggcgacggcgcgactacgcgccgagcgccgcctgcaccgccgcgcgcaagcggcgcgcggcggcttcgatgtcgtcggcggcgaagatggccgagaccacggccgccccgtcggcgcccgtgccggcgagcgcgggcacggtccgctcgttcaggccgccgatggccacgacggggatgtcgacggccgcgcagatggcggcgaggccgtctgcgcccacgtcggcggcgtcgggcttcgtcggcgtgccgaacacggcgcccacgcccaggtagtcggccccgtcggcctgggcggcaagcgcctgctccaccgtctgcaccgacacgcccacgatggcgtccggcccgagctccgcgcgcgcgtcggcgcacgcggcgtcgtcctgtcccacgtgcacgccgtcggcgccggcaagccgcgccgcctccacgtcgtcgttgacgacgaacggaacgcccgccgcacggcacagcggcgcgagcgcgcgggcgcgcagcaccacctcggtccggggcgcttctttctcgcgcagctgcacgaaggtcgcgccgcccgccagcgcctcctcgacgcatgcggcgagcgtgcgctcccccagccacgcgcggtcggtgaccgcgtacagcgccaacgcgcggcgcagattctcccgtgggtacatcggccctcctctcgcttccgccggctacgccagctcttcgaccttcgcgcctgcctcgagcgcgtcgccgtcgaggttgtacagcgcgtccaagaggtaggtgcggaacgacccgttgccgtcgaggccgcccatgcgggcttgcgcctgctggcccgcgaggcccatgccggagaccgccgccacctgcgactccaggagcgcgcccgggttcgccaccgcgtatgccgtgcataggcacgacagcatgcagccggcgcccgtgatgcggcccatgagagggctgccgttgcggacggcgtaggcgcgctcggcgtcggccacgatgtcgatggcgcccgtgatggccacgaccgcgcccgtcttcgccgcgaaatcgcgcgcgaacgccgcgccggccgccaggttgtcctcggtgaccgcgtcgtcggggcacacgtccacgccgcgcgtggccgccgcgccgccggcgagcgccttcacctccgacatgttgccgcggatgacggacacggccagcttgtcgagcaaatcgcccgccacgcgcgtgcgcagggccgacgcgcccgcgcccaccgggtcgagcacgatgggatggccgagctcgctcgcgcgggcgccggccgcgaacatgccctcgatggagcgctcgttgagcgtgccgatgttgagtgtgagcccgccgcagatagacgtgatgtcctccacgtcggcgggctcgtcgctcatgatggggctcgcgccgatggccaaaagcgcgttcgcgcagtcgttcaccgtcacgtagttcgtgatgttgtgcacgagcggcgagcccgcccgcacgttgtccagggccttcttcaaagcgaatgcctccataggttactccttcccaagatcgaccgtcaggccgtccatgatctgatttacggtgcgcatggcgcacatctggccgcacatggtgcaggtgccctccgtcgaaggcggggcgctctcgaagtactcccgcgcacgcacgggatcgagcgcctcggcgaacatgccctcccagtccacgcggcggcgcgcgtcgctcatgcggttgtcggcatcgcgcgcgccgggcacgcccttcgcgatgtcggccgcatgcgcggcgatcttcgtggccacgaggccctcgcgcacgtcggcggcgtcgggcaggcgcaggtgctcggccggcgtgacgtagcacaggaagtcggcgcccgacgaggcggccacggccccgccgatggcggccgtgatgtggtcgtatcccggggcgatgtcggtgacgagcggcccgagcacgtagaagggcgcgtcgtggcacaggcgcttctccagcttcatgttggcggcgatctcgtcgagcgccatgtggcccgggccctccaccatcacctgcacgcccgcgtcccacgcgcggcgcgtgagcttgccgatctcgatgagctcggcgatctgccccgcgtcggtggcgtcgtaggtggacccggggcgcatggcgtcgcccaggctgatggtcacgtcgtgctcgtgcaggatggccagcacctcgtcgtagaactcgtagaaggggttctcgttgccggtagcctccatccaggcgaagatgagcgacccgccgcggctcacgatgttcgtgaggcggcccgtctcgcggaagctctcgatggtgcgccggttcatgccggcgtggatggtgacgaagtccacgccgtcctcggcgtgcgcgcgcaccacgtcgaggaagtccgcggccgtgatgccgacgagcggcttctccaggtagccgatcgcgtcgtacaggggcacggtgccgatcatggccggcgacttctcgatgagggcgcggcggaacgcagccgtcttgccgctgttcgacaggtccatgatggcctcggcgccgagctccagggccacgtcgaccttcttccactcctcggcctcgcaggcgacgtcgcccgagatccctaagttcacgttcaccttcgtgcgcaggccgccgcccacgccctcggggatgaggctcgcatggtggatgttcgcggggatggcgatgcgcccggcggccacgccctcccggatgaactcggggtcgcgcccctccttctcggccacggcgcgcatggccggcgtgacggcgcccgcgcgggcatggtcgatttgcgtgacgggtgcagggttgccgcgcgttgcggcgctgatctgcgtcatagagctcccttcgttggcattacccatgtcaggttcctcgggtcgaagcgtgcttcggcgcttcctctcagcctgcccggccgcccatgcggcttgcaagctccccggtatgtcgaggccgcctcgcggcggcgcggcgccaggcggtgccgctcgggcgattataccgccccgccctgcgtttcgcgcgccgaatccgccggcgagctctacgaaccgttgaattgcacgcaggccgggcgcgtcgcctgccggccgcgtcagggcagcgggtagaacacgtacagcgtcccttcctccacggcgatgcgcgcgggcttgcccacgagctcgttggacacgccgcgggacgtgcggttcgaaaggtcctcgtcgtccagcgagtacagcatgcccgtctcgatgacgccgcgtgcgcagtcgttcgcggagaacacggacaccgtgccggactccatcaggggcaggtccatcacgtcggggccggtgagcgcgcgcagggcgctgtcggcgcccacggcggtcacgtagaactcccgctccgagaacttcgcgaacagctgcaggttcgcgatggtgtggtcgagtcgcccgcccagggccgcgtacaccacgaggtcgtcatagtcccaggccacggccttctcaagcgccagctccatgtcgcttttgtccttcttcaccggaaagcgcgacacgcggcggcacttggggatgtagccaagcgagtcgaagtcgcccaccgccatgtcgggcttcacgcccagctcctccaggtaggcgaaaccggcgtccacggcgatcacgaactcgaacatgcccgcctcgtggcgggccctgaagtcctcggcattgaactcgggggacgcccccacgatcgcgcacgtcgccatctacctcgccccttccgcacgtccggctgccggagcctgggccgcgagcgcggcaagccgctcgccctccaaccggtgcagcacgagcgcgtcgacccgttcggcatccaagcgctcgtagaacgccagccccgcctcgttcgtgtcgcggcagtgccacgagaggcgccggtagccccgctcctcgcagagcgccgccaggcgcgccatgagcgcccggcccgcaccggcgccccggtacgcctcgtccacgaacaggtcctccaggtacacgccgcaggctcccgtccacacggagaacgcgcggcagaagatcgcgcaccccaccacgccgtcttccggatgctcggcgaccagcgcctcgcccgccccctcgtcgaacatgccccgcacgatatccgcaggcgtggcggccaccgcgccttcgcggcccatcgaggcggcgagcccctgggtcagcctgagcagtgccggcgcgtcctcgcgcacggcgaagcgtatggtgagttcctcgttcatggtgctccttgcctccgcgggcacacggcccgcccgccggccgcacgcggccggatcggtttttcgcgctgcttcgcttttcgcgggcgcgcgctgctttcggtttgctagaataccatatgcgagcgggccagacgatcgcgcacctcggtgtgaggaaagtccgggctccacagggcaggatgccagctaacggctgggcggggcgacccgacggattagtgccacagaaaaggaaactcccccgcgaacacgcgcttcggcgcgcggcaacgggagaaaagctgaaacggtgcggtaagagcgcaccagcgcgccggcaacggcgcggcttggaaaaccccatccggagcaagcgcaaataggaacgcgacacggtggcccgccgtacgttcgggttgcgtgcttgaggcgtctggcgacaggcgttcgagataaatggtcgtccaacgacagaacccggcttatcggcccgctcgcatttctcccaacccgcgccccctctgactttacaggagatcggggcgaagagaccgcctccgcaagcaacacggcacccgcggcgagaagcggccccgtgcggctgatccgacaacgaaggacgacgaggcctccatcgcaagcccggccctcccctgcagaaggcaggaaagggccgggtggggaatcggcggcggggagggagggatcaaccgccgggagtatgcctcggttctacgcgccgaacacgccgcatcccgtgacgtagccgagcgccatggagctgacgccggacatgccgacggtcacctcgcccgctgcgtagagcccctcgatggggatgccgtcctcgcgcactacctgcgagatgtcatcggtgaccacgccaccctcggtgatgtgcgccgcccacgtgcgcggagaggcgtagaacggagggttctcgatggggctgtccggcgtgaagatcatgcgcccgaagtcggggtcctcgcccgcgcgcgctatctcgttgtagcgctcgacggtcttcttgaacgtgtcggcgtcggcgcccatctgcttggcgaggtcctcgatcgtgtcggcccggtacagctgcccctggtcgagcaggcgctggatggagcggccgtagtagttcttgtcgccctcgatgcggcacgtgtccttgtcgctgatgaggaacagcacctcgtcgggctgctccatgagcgctgcggtcatcgtgtagcggtcgagcgtctcatcgacgaagcgctcgcccttcgcgttgacgagcaggcagtcggtgtcgctgcccaccgtggtctcgtccgcgccgttcttcacgtcggcgaacgggaacatcatgagcgagtccatgagggccacttcggcgccctcgtcgagtgcgatcttgatgccatcgccatggtggccgtacacgttcgtggtgggaagcggggtcttctcgtcccacggccacagctcgttgtactcgcgcagcatctcgggattgccggagaacccgcctgtggccagaagcgccccgtgtgcgctgcgcacgttgtaggtggtgccgtcctcggccacggccttgaagcccaccaccttgtcgccttctttgagaagctcggtggcgggggtgttgagcatgatctcgaccggatagtcgttctcctcgatcttcttgtcgaagaagttgaagtagccttggccacatacaccgtcatcaggggccgaccatggcgccgcttacggcgacgctcggcgaattcgcgtccgaccttggcgtgtcggccggctacgccctcatgttcctcgtgctcaccttcctgatgtgcgatctgtcgcatcgctacggcgtgtcggtgctcgtgctgtgcggaatgcaggagcttacggcggccttccgcctgttggggcatcaagtgccgacagccatgtcccacggcgcgctgcctgctttcgtcgatgactcgttcgtgtcgatggcgctcactattgcggtggcggtggccagcatcgcactgctgttcggcaaggagcttccagggaaatggggcgcctcgttcttcggcgtgggcacgatggccgccgaaagcgaggagcacggcctgcttgcccaacgctgcgcggcgctctgcgaagcgcacaacttaagcccgcgcgagcgcgaggtgttcgagctcctcgcccagggaaaacgcccctccgccatcgaacgcgagctggtcatcgccaacggcacgctcaaatcccacacgagacgcatctaccagaagctcggcatccacagcaagaaggagcttttggccatggtcgcggccgacgagccggcggacgctcaagcctgaccgcccgcacgccgcccgcaagcgagacaggggccagacagggggacggttctcttgtcttgcgaggcctacgcggggaacagcgtgtacgcgatgccctctgcggcggcgtgcgggcggatgctcacgccgaaggcccgctcgatggcgccggtttccagcacctcccctaccgtgccggccgcggaggctcgcccgcgctccatgacgagcaaacggtcggagtagcgcagggccaggtcgaggtcgtggatgaccatgacgacggtcttgcccgcctcgacgttcaggcggcgcacgagctccatcgtctcatggcaggcgcggatatcgagataggtggtgggctcgtcgagcacgatgaggtcggtgtcctgcgccagcgtcatggcgatgaacgcgcgctggcgctcgccgcccgacagccggcgcagctcgcagtcgcggaaccgcgcgacgctcgccagctcgagtgcgcgctccacctgctcgcgatcctcgcgcgagagccttccctggcgcgcctggtacgggtagcgcccgcaggcgacgagcgcctccaccgtcatcgccggaggacggctggcctgcgcgagcacggccacgcgccgcgcccgctccttcgccttgagcgacagggtgggcacgccgtcgatgcgcacctccccctcgctcgggcgcaagagcccgtcgacgagcttgatcatcgtggacttcccgcagccgttcggccccacgacgctcgtcaccgctccgtgcgggaacgcggccgaaagcccctcgatgaacggctccttgccgtaggagaacgacacgtcgcgcacctcgatggcagggagggacgttggctggcgccgcacggagtccttcggctccggcctgcggcctccgcccaggatgacagggtcagtcaagggatcccctcctgttcttcaagatgaggtagatgaagaaggggcctcccagaaacgccatgaggatgcccacgggcacctcgtagggcgcgaacagcacgcgcgcgagcaggtcgcacacgacgacgaacgccgcgcccgacacggcggacagcggcagcaccaaccggttgtcgtggcctacgaagaaccgcacgagatgcgggatgatgagccccacgaacccgagcaggcccgcgaagctcacggccgcccccgccagcacggcggcgaggccgagcatggcgagacgcgtcgcccccacgttcatgccgagcgcgtgcgccgtgtcgtcgcccagcgccatgatgttgagctttcccgctgcgagcagcgccacggccaggcctcccacgatgtaggccgccggccacgcgaggtcgtccatgagcacgccggccaaaccgcccacgaggaacgccgacgagccgatgtaggcgtcggggttcacgatgaggatggtgttcatgcctgctccgaacaccgacgtgatggcgatgccggccagcaccacggtgagcctcgacgtgctcgcgcccagcgagatgccgaagatgatgagcgcggtggccagcgcgcccgcgaaggccgcgagcggcggcagccacagcgcgctggggaacacgcttgcggcgatgagcacgaacaggcccgcgcccgagttgatgccgatgatgttggggctggccagcgggttgtcgagcaccgcctggatgatggcgcccgccacggccagcgccccgcccgccagaagcgcggccagcacgcgcggcagacggacgttcacgaggatgctcttcgccgatgcgctcacgtcgccgccggtcgcccaggccacaaggtcgcccaggctcaccgacgacgagcccacgaggaacgccgccgccgtcacgcccgcgaggacggcggcggagacgacgatggcgagcggcgccgccttctcgcggctgaacggggacacctgatgcccttcgtcttacgcgtacagggcgtcgaacagcacctggtagctctcgtcccagcgctcgttgggcttgtactggaacaggtgcgggtcgagcgtgacgtagcggccgttctgcaccgcgtcgagcgtcgaccaggcagggttcgccgccgtctggtcctcgagagccttcatggccgcagcatcgtcgttgcccatgggaaccacgaagatgaagtcggggttcatctcgatgatcgactccaggctgaagtccttgagcaggctcgggttctcgtcggccaggttcttggcgccgagctcggccagcatcgagccagtcatcgtggaggacgcctgcacgcgcgcgccgcccgagaacgtggtgagcacgagggccgtcggcgcctccccggcgggcaccttggccgtgatcgcggcgatgcggtcggccgtggcctgggcgttctgctcgtacaggtcgtcgcggcccgtgatgtcgcagcaggtgcgcagcatgcgctcgtaatcggcgaacgtcgtcacctggaagcacgccaccgggatgttcgacgcggccaacgccgccttgaggtcggcctggctcgagtcgccgccgcggccgcccgagccgctcgtcatgatgacgaagtcgggctcgagggcgatgatggcctcgaggttggggctggagaagtcgcctaccttctgcacgtcgggcgagacgaggtcgtagtcggacagcgtgaacgcgtcgtcggaagcgcccacgagcgtgccgcccgcgagctcccacatgctggcgaagctgcccatgcacgccaccacgcgctgcgggttgtccacggtcacctcggcccccgtgtcgtcggtgaacgtcaccgcgccggcctgcgaggcctgccccgcctccgcctgcggggcgcccgcaccggcgccggcctcgggctgggaggtcgagcagccggcgagcagcatcgaggcggcgagggacgcggcgacggcagcgggcacgatgcgttgggaaacaagcttcatgggagatcctttcgatgagatgtcctaggtccagcaaagtcagcgagggtttccatggtgcacgagatcgtggggaggccgatggcgaagcgtacttcggtacgcgagccatcggcatcgccgcgagatcgggcgccatgggaagccgcagcgtcgactagttgcgctgttcgtcagaacagcgcaacccatgtgcgcagtaatcgtcctgggcgaggatgtcgccgtcgtggtagtaggcggcgcgcgcacggcagccgccgcagccttgcgcgtagtcgcaggtaccgcacgagccggcgtacgcctgggtgcgcagcttctcgaacacggggctcgtgcgccagatctcgtcgaagggctgcgtccgcacgtcgccggcttcctcggtcatgtaggcgcaggggcgcacgatgccctcgctgccgatgacgcagtacgtgaggcccgccaggcagccgcgctcgaagcgggtgtcgacgcccagctgcttcgccacgcgcgtgaactggggcgcgcacgtgggcttcacatcgatgggcacctgcgacgccttcgtcatgatgtcgttcagcagcttctcgttctccagcacctcgagcgacgtctcctggatgaacttgccgcggcccacggggatgaggaagaacacgtagtgggccatcgcgccgatctcgacggcgaagtcggtgatggcgcacacctcgtcgcggttccagtccaccacggtggtgtgcagctggaagggcaggccggcctgcttgcaggcctcgatgcccgccatggtgaggtcgtaggcgtgctcgagcccgcggaacttgtcgtgcttggccgcgtcgaggctgtccaccgagatgcccatggcgcaggccccggcctccttcagcctggccgccgcctcgagcgtgatgagcgtgccgttcgagccaaacacggggcgcagcccgcgcgaggcggcgtgctccaccagctcgtagatgtcggggcgcatgagcggctcgccgcccgagaagatcatcaccttgaagcccgcgcgggcgatctcgtcgatcatcttccttccctcgtcggtcgagagctccaaggcgctggcctcctcggcatcctggtagcaatggacgcacttgaggttgcacttgttcgtcgtcatccacgacacgagcatgggcgtatcctttcgttcgggcgcaccgacagagggtgcgcggggcaccgggtgaatgagcaggcaagatggagggtttgcgccggacggacagaacactggggagagagcgaaggaagaggtgccgcgcccgtccggcgccggatgaggctagccggacgggtcgggctggccgcggtaagcggctaccacggcctccagatggtcgaacaccgcttggcgcagctcgtcgaacgagccgtcgtcgcctccatggggagcgatgttctccatgaggatgaagttcctctcggccgcggcggcatcctgcgacgcgtcgagggccaggtagcgtcgtgccaggtcgcggttggacgggctgtcgacggcctcgcctgccggcatgaggcggatagtgtcggcgatgagctcgtgccattgcgatacggactcgccgcgggcgatgcgatcctcggcggccgtctcggcggcgggggcgtcgtcgcggatgcaggtgaggcgccagaagaactggctctcgccctggcagcgctccacggtggaggcgagcgcctcccagtccggcattccctcgccggcctcgtcgtgcagggcgcgcagggtggacatgcgcctgaacagcgcttggaactgctcctcgatggcgtccatttgctcgccggcgagctcctgcagcgccgccgcctcgtcgaacagatctgcatcggatttgacctgggcaagcgacagccccaggtacttcaaggtcagaatgcgatacaggtctttcacgttgtcgtcggtgtacaggcgctggttctgcggacccttcgccgacggcgagagcaggccctgctggtcgtagtactggatcgtgcgcaccgtcaccccgacgcgccgggccagctctcccacggtcaggtatcgttgatcggtcatgcggctgctcctcatgaggctccgcatccgctcgatgcggccgcctcctcgtcctcggccgaacgcccccgtccgaccgaaaccgagcatatgcgatgacgctacgtcgccgtcaacggcaaatccccgtctttcagaaactcgcaacaaaaacgaggggaaatccctcgccgccaagcgcactgcccggctagcagcgcggaagagatgccagccacgcgtccacctgggcctggtcggcctccacggacagccgcttgcggcgcgccgtatggcccgaggccacgcccacgcgcgacttcggcacgccgagcgcctcggccaccagcttgcacaccgccttgttcgccttgcccccgtcgggcggtgccgtcacgcgcacgcacacctcgtcggcgcccgccgcatccgcgcgcacgcccgaaacctcgtcacgccccgagcggggcgtgacgtgaacggctatgatggcaggcttcatgacccttgcgctcggccgacaggccagcggggctcgctagtcgatttcctcgaactcgaaggcatcgtcggcatcgccgaagccggagaggtccttctccacgcgggagggcgtgggggtggcgggcgccacggacacggcgccggtctgcggcatggcgtaggcggcggtgccgtcgacgttgatgggggcctgggcgggcgaggtcatcacgcggcccgtggcctccacggtcgtctcggccacgcgggcgtgcgcgctcgtgggcagggacggagtcgggatctcgccgccgatctcggccagcttgcgcgtggcgtcggcgatgaagtcggtgagcagctcctggtagtcctcgcgggcgtcctcgcggtcgtcctcgagcttcttgatggcatcgagcaccttctgcttctcggcctcggccttgtccacgatgcgcttggcctcgtcctcggcgtcgttgatggtgccggcagccgtggcattcgcgttcgagatgatctcgtcggcggagcgctgcgcgatgatgagcgcctgggcgatggcgttgtcgtcggccttcttggcctcgagctgacgctcgaggtcggcgatgcgcgcatccttcgcggccagctcctcgtcgctcgcgacggcgacgggcgcgggcacgtcctcgatgcgcgccggcgtgtcgaaaccggcgaacgaggagtcgtccaactggcgctccagctggtctatctgcgcggtcatcgcgtcgatctcgtcggcaacgtgctccaggaacacgtccacttcgtcgacatcgtagcccttgcggtcgatcgagaagctctggttgtggatatcagccgaggtgattgccatagtcggtcccttcgtcctgtccgcgcggacgcggttcaagcgcagctaaaacaagtttactatcaaacgtaccccgaattgtagtacaagcagggcgatgatgggagtaacgtccaccatacctccaagcgggggaatcagtttcttgaacaggttgaggtacggatcgcacacgcggccgagcacccggtagatgtcggcgagcaggccgcggtccgtggggagccacgacatgagcacgtacacgaacagcaccatgctgtacacgtcggctagcgatacgatgaggtatttcaagctcagcacgagcccagctccttctcttggtagacggtcggcgcccgggaaggcgcgctacagcacgccctggttgcgcagcgccaggcgctcggcctcggtgagcgcggcgccccgcgtgatggcgaacaccttgtcggccacggcctccacgcgggcgtcgagcgcgctcgacacgccgaatgagaagtccaggatgcgcttggccagctggtcgggcgtgttgcgcagcgcaagcaccaccacgtcgcccgctttcagtatcttggccacgcgctccacctcgccgtagctcgcgggcttgagcaccgagatggcgcgcgacgggttgtgcgcgggcgtgcccgagccggcgtacgcctcgtaggggtcgaacgagccggtggcctgcgaggaagcgggcgttgtggccgtcgcggtggccacggccacggtggcggaggccgcagccgcccccacggtcgccgcagccggagaagccgccttgcccgttgcgggctccgcctcggccgcgctgggctcgaacagcgcgttcaggctctcggagcgctcgcgacgcgcggccgtgtgggccggcgacgagggcgcgggcatcgtggcgtccaccaccgtgcgctcgccccggtagctggacgacgtggacgacacgcggcgcggcggcagcgggtcgcggcgcaggctgtcgggcacctgggtatgggcgcgcacgtcgtcgatggacacgagcttggggaagtcggaatccgacgaggagcgcgcgctgcggctccccccgcgcgccgggcgcgtggtcacaggcgcgtacgggtcgtagcgcgaggcgggcgccccgtcatcgtagcccgggccgtactcgccgaactcgtcgtcgtagtcgccgaagtcgtccccgtagtcgtcgaggtacgcgtcgtcgtatccgccgccgttgccggccgcgtcagcgaagcccagcttcgacttgatgccgtcgagcatcccgccgccgtgctcggatcgcttgattttgggcagctccatgttcaccacctgcttcgtttggttccggcggtcgagccgccgctgcgttcaccctgctgcgtttttccgtctgtccttgcttcgcgccgcccgaggcgtgccggcgcccatcggccctgtgcgcagtgccccggcacccgggcctcaagcctcgaaggcatcgtcgaacacggcccttccgatgcgcactatggtagcgcccgcacgcacggcctcgcgccaatcttcgctcatgcccatagaaagcccatcgaacagggccgcttgcgcgggatcgagcccggcgcgcagctgggcatgcaggttcgcgaggccctcgaacacggcgcgcgccgcggccggatcgccctgcggcgccatggtcatgaggccgcgcacccgcacgtgcggaagtcgcgcgcatacgtcgagcagcgcgcgcacgtcgccgggagccaggccgcccttgctctcctcccccgacacgttcacctccaagagcacgtcctgcaccttgcccgccgccgcggcggcctcgtcgatcttgcgggcgtggcgctcctcgaaaagcgagtggacgagcgcggccgaccgcacgatgtcggggatgcggcgcgactggatgttgccgatgaagtgccaggttgcctgcgggaacgccgccgccttctcggccagcccgtcgggacggttctcgccgaagtcgcgcgcgccggctgccagggcgcgcgcgacggcgtccgggcccacggtcttcgacacggccacgaccgtgacctcggccgggtcgcgcccggcctcgcggcagacggcggccacctcggccgccacgttcgcataacgttgctcgatacccatggccctatcctttctgcagcacggcgatggcgccatggcggccgcaggtgccgcccgacgcgcggtaggagaagtagtcgtccggccggcaggccgtgcacgcgccggcatccgcgatgcgctcggcggcgaggccggccccgcccagatcgcacgcgagggcgcgcgcgaggtcgacatgccgcccgtcaggggcgacgtccgcgccatagcggtccacgaaccgggcgcgcacctcggcgcccgtctcgaagcattccgcgtggatgtgcggacccaggtaggcgttgagcgctgcggccgcagaggacggcgctatgcccagctcggcggcgtcgcgcgcggccaggagccgcacggccttcccggcgatgccggctaccgccccgcgccagccggcgtggacgacggcgaagcgccccgtgggagaggcgagcaccaccggcacgcagtcggcgaagcacagcagcgccgcaacctgcggcacgtccacgagcaggccgtcggccccctcgagcgcgcgggcgcgcgcggcctcgacggcgcccggctcggccgaggccacctccacgatctcgtcgccgtgcacctggctcggcaccacgagggccgcctcccccgcgccgagcgcctccagcaagagctcccggttgcgcgccacggccgcagggtcgtcgcccacgtgcccgcccaggttgagcgcggcgtacggcccctcgctcacgccgcccgcgcgaccggtgaacgcgatgcgcacgccggtgcgctcgaacagggcctcgtcggtgagcgccgataagcgacgcgcgccgaagaggcgcgcgtcgagatgcggtacgggaagggttgcggccgatgccatgcaggcggcccctagcgctggcgcttcaggaagtcgggaatgtagtcctcgtccgcgaagcggccgttgttcgacgacgtggagaacgacaccggcggcatggactgctgcgggatggacggcgcggcaggctcgggcgtcgtggacgcgaacaggtccttgcgcgagaagtccatggaggactgctgctgcgcgcttgccttgaagccggtggcgatgacggtgatgcgcacctggtcgcccatgccctcgtccacgatctggccgtagatgatgttggcgttgtcgtcggcgcaggcctcgacggtgcgggccgccgcgtcgacctcggtgagcgtgaggtccgggccgccggcgatggagaacagcacgcgcgaggcgcccgcgatggacgtctcgagcaggttcgagttcgtggcctgctgtgcggcgtcgagcgcgcggttctcgccggaagccaggccgatgcccatcatggccgtgcccgcatccttcatgacggtgcggatgtcggcgaagtcgaggttgatgaggccggggatggtgatgaggtccgtgacgccctggatgccctggcgcagcgtgtcgtcggcgatgcggaacgcgtcgagcatgctcgtcttcttgtccacgatctcgagcaggcggtcgttcgggatgacgatgagcgtgtcgactttctgggacagcaggtcgacgccctgctccgcctggttgcggcgggtgcgcccctcgaacgagaacggcttcgtgaccacgccgaccgtcagcgcgccgatctcctcgcgcgcgatctcggcgatgatgggcgcggcgcccgtgcccgtgccgccgccttcgccggcggtgacgaacaccatgtccgcctcggccagcgcctcgcggatctccgcgcggctctcctcggccgcctggcagcccacctcgggattcgcgccggcgccaaggccgcgcgtcagctcctcgccgatgtggatcgtcttgtcggcatccgacatgagcagcgcctggcgatcggtgttgacggcgatgaactcgacgcccttcacccccgcctcgaccatacggttcacggcattcgtgccgccgccgccgacgccgacgaccttgatgaccgccaaatgctcggaacccattttgtttggcattgtatcctccacacctgctgcgtttctttatgctgcgttttcccaacgtgggtacagttcacgtggggttattgtacacgatgctcaaccatttgcaaattacgccgcggtaatgaaaaccgcacgtccacaatatgaaaccggtggcggtgcagcggttgattgcggccgccgatcgaccgccgcatgcggatcgatcgcaaggagggcggcacccgccgccgctcggaatcagggcctgtgcgcgaattggagcgcgggccacctcgaagatgcagtcatgcgccttgaccatgaatcccaggcgacgctgacagcctggtggagaggggagacccctcgccaacaggctgattggacctactagcatggttggcgagctacggcaacctgtaggaggtcgatcgaccgcctgccgtcgtgaccaagacccccttctcgaccatggcccccaagcgacgcctcacagtcctcgcgcttgcattcgtgaacctcgcaacctcggacgcagtcacgctatcgcgctcggcaagcatcgccatcacaaccgattcggtgccgctttcgtagccggcagcattgcgaggccgccccgaagcaccgggaaccggaacgaacgctttgaagaaatcgccgtcctcaagttcgggatcctgacccgaatagagtcgggagtatttgaagatgtttcgagtcccactccccaattcctctgcacgtccgatctgggagaagaaattagcgataatggggtttttcggcgtcggatcgagattgtcgggagtcagcggcccggagtacagggagcggcttgcgtttttcgttcgaatgccctcttcatcgataacaagcttggcgatataggggctgatgaacttgcggtgaataagcgcgttcgaaacgagttctcgaacgatgacgtcccttgcgcttacccgctgcatgccctcgagggcaaacgagtccggaagccatttctcacagaaaccaacgagcagatcgtaagcctccaatagattggttttcacaacgagacggtcatcgtagcgatcgacgctctctctcctcaatacggcatcggtgcggtaagcgggagaaacgtcgagtatgaggtcgtctttgccgaacagcatgatagctgccaacgtgaacccttctttgcccgtttcagggtcgcgcgaatagaggcgggagctgcggaacagctcgtcgacctccaaggagagccatgggtggttcatcctgttcaccaagatcatgcttttgacccgaggtatcaagtccaaacgcagatcctgctcggtcacccaaggatacacgcgacgctcggtgtaatagttctgcttgcgcaggtaaagcgcgttgatctgagcatcgctcttcacgcggatgtcggcgtcggcagcacgatcatacaccgtccccctgaaacgaaacaccatggggtccatagggacccaaatgcgaagaacgataagccccccccccccgaaggttatgcgctcgaactctatcgccggcgggacgttgaatagatcgggattgttcaccacgttcacaatattgcgctcgatggcgctgacggcccttgcgtcgatcccctcaacggctccatcgtccaacacgccgagcaggatactgcccccttgcctgttcgcgaacgagcagatcgtctcgaacgtatccgctcccggctgattgccgcagcgcttgaactccaacgacaatccttcaccccgggaaagatagccatcgagcttcgaaccctccatgcgccctccttaccctcggttcttttctggccattttacacgattggccggaatatggccggaatacgcgcactatgcgcccgggaagcagcggaaccacttgcagctcttcgacgaggcagtcgtgggtcttggtcttcgggtcccaggcgatgccgacggccagggagcgagccgacccgcgtttccccagcaggccgtcggcgaagagcgcggcgtagtcacgtttgcggatctgcgcgacagcctctgcggcggtgccgcccgtcttcagctccacgatgaagggacgccagcgcgcctcggcgagattgcggggaatgaacgtcacgtcggccacgcccttgccggccggctcctcgcgacgcacggcgtagcggtcgcgggctgcgaggtagacgaggttcacgagcgccgccaggtcggcttcattcgcgtagcgcaggagcggcacctcctggtcgtgggccgcctcgatgacctcggccatcgtcgccacgtcgccgcgaagcgtggcgtccagcatgccctcgctgcgccgggtcaggcgcgcgacgtagcccatgccctccttggccagcagcttctggacttcagcatgagcacgtggttggggatggacacgcacccgtcgtagtacgtgaggaaaccgtacaccaccatggccgagaatatctcgtctttcgtggacaggctcatggacgaggccgcgtagttctccatctccgcgcgctccggctcgccggctgccatgcgcaccaggtcgtcgcgcacggcggcgatgttgttgcgcacgtagcagtggatctcgtcgtaggggcccgactcggtccagcagctgcgcaggctgtcgtcgatgagcgccagcaccaccgaccgcgggctgaagcggcgctcgccgtcctcggtgaggtagccgccgtaccagtgctcgagcccctcgtagcctacccgcgcgtccggtgtgcatgcgaggtgccgagcgcagagctcgcacacctcgtcctgggtgaacccgaagaagcggtcgtaacgcagatcctccacggcgccgtactcgacgaacatgttcagctcggagcccgtggagtgcttggcgatggagaggatgcccgccatgtgggagagctcgacgtagggcttggttttgagcagctgcttcaggagcatgaggaacgagcgctggccgtcctcggtgaacagggggttgaagaacagggagtcccattcgtccatgatgaagcagaattgcgctttcgtgacatcgtagacgcattcgtgcgctgcgaacaggccgatccgcggctcgacgcccgcctcgggagcaaacgcgcggaggtcgtcgacgatgcccgcgcggatggcgtcgatgtaatctcggtagctctcgcattcgtcaggcagcacgctgaagtcgatgtagatgacgtcgtgggctccgaggtgcgccatggccgcagggtcgcaggacacttcgagcccctcgaacagcggggccgcgtccaagccgcgcgtgaggaagctcgccagcatttgcgcgttgaccgtcttgcctaaccgacgcggacgcgtgatgcagatatatcccccgtcttgtcgacgaagtaaggcgagcccgtaattcttaaggaggttcccgtggcatatatcaacagtaacgcgccgccggtcggatatggttcgcaagcccaagtataccaacaacgacccagcgatcaggatcctttcacaaagcgtaaaagagcaataaccccttgcggcgcttttttcgcagcggggaggtgcgtcgagcttttcatgtcgaccttaatgccgatcgatggcggcgaccactttcgcggacttttttagcgcgtctccgaatcttgcgcttatggtttttcacgtcgaccaaaatggggtcattcggaaaagcattctgagccctttcggcgtaagttagaaaattccctcgacctccgctcttcccaactcgctcgcgcactttggcatttctcttaggcttgcggccccaatcactgtactccagataaagtgaatcgactcgtttttttgctggcctgaacttccatttgtacaaccggcctactctcctgtacatgcgcttgtagaaacgaccgatagttctttgccgcagtctcaccgacgtaccgtcaaaggagaaccccagatagtcgatagcgcatttcggctcgtcttccgagtcgagcaggtaaacccctccgtcaaccatcctaaacgaatgcgtcttacgtggatgaatcttcaacgacggcatcgttccggccaaacgtgaaaactcatcccgcccctcttcaaacccttcctcggtaggcacaacgaagatgaaatcatccgaatagcgcatatataaaccgtcgtgcctttcggctacagctttgactgccgcatcaaattccagcatgtatatgttcgctagcgtgccactaatgggaagcccctggggtacacccttttctccgttttccctccatggacgctcaaccgaagcgcccaccatgtttttgaactcatcagagctcagcactctgcccctgttgttgagtcgtttgacgccgctcttcgtataaggaagcccgtagtggtcgagaagcttttctatatcccaaaccgaatgcctggttgcattcttcagcacatggtaataatcgtccgggatcgcaccgccagggaacaatcgcctaacctgctttttcagataagcatgatcaagcgtttcgaaaaagtcctcgaaatcccccgcataagcgaaacaagcttcaagatctctcatcttcgaaaaagcgcgcaacgcgaagtcgcagtttgactgccccttgagatgggcgcgatacgcgatagcgcaatcgccaatgccgatttcggtcgcaacatcgttgtatcgttcattaagcaagcccgaatagtactgataaatgcatctatcgaggtgtgcggcgtattttataggacgtggatcgttaaaaaacttgccatgtccatcgggcttcatgcggcgcaagtccctctgaatgaggggataaaatgcatagctttttacaaaaccaggatccatgacaaggttggccttggcggcgaacgaagtcctgaaatcaaaatgaacgtacgactttatcgtatgcggcttcttaatgtaaggaggaatgctatccgtcatatctcgtctgcccggcaagccggccctatcaaggggcggcgtccatttcagggtcggctcgcttacataaatgctgcggccatcccgcagcccttaccgcttcatcgcgaaacggtagccgcctttcgggtcaagcccgtaaagcaatcttcatctgcggcacaatcgccttagacgaaaggaacgcatccatgagcctcgccgcgctgtttgtcagcaccattagcctagctgatggagatttcgtgagcatccatcgatggatgtttacgacagtgttcccccaccgtggctaattccacggtgcaagatcatgttaactctaactctatcgttcttgaagtcccaagtttttcaatcagccaataggcgtcaaaaccacaatcaagttgattagcaacttgatccgaacactttgcctttcctcttgaagttagccgaacgcgtacggttgagtccgagaatccttgtccgagggcgggcccgaagggggcggccgcgtaggggcaaggatcatggcagagaggaagcagaagcgctacttcaggctcacgaggtcggagcgggcctccatcgaacgagagttcgggaagaggaggccctcggcccgcgacgtcgcgcgcgacctcgggcgctcgcccgcctcgatctccgacgaggtcaagcgcaaccgcacggtggcccggggcccgggcaagggcgagcgggccggagatgcgccggaagacgcttgcgcgcggctgcaggcgtggccttggacctgcaacggctgccagcaccgccgctacggatgcggcaaggccctccggtgcgagtactcggcggcgcgcgcccagacgctcgccgacgggctcttgtcaggggcgcgcaggggcgtgaacgccaaggagtacgacttcgagcgggccatggcgacgatcaggtcggacgtggcccggggcctctcgcccgcccagatagcctgcggccgcgccgatcggttcaaggttcaccccacgacgatataccgctggatagcggcgggctacgccggcatgtccgacgccgagctgcgccgcaaggtcggctacaagcccaggagggagccctccgcggccaagccgacctcccacggcccggagaggtcgtacaaggcgttctcggcgctccccgaggaagggcgggcgcgggctgccgagatggacacggtcatcgggctgtccaaggactcgcagtgcatcctcaccctctactcgaagccctgcaagggtccaggtctgcctgcttctgcccgagaagacgtcgagcgccgttgccgcggcgctcgacatgctggaaagagcgatcgggaagcccctcttccagcgcctattcgggctcgtcctcacggacaacgggtgcgagttctcggacacggaggccctcgagcgctcggccttccacgggacggcccggactaaagtctactactgcgacgtgcgagcgtcccagcagaagggaggatgcgagcgaaaccacgtggagctccgcaagctcctgcccaagggccgggggatctccttcgacgaactggacggccgcgatctggccgtcgtcatgagccagctcaactcggagccgaggccctccctcatgggcctgtcgcccacggcgatgctcgaggccgccgacccggaggccgcggccgccctcatggacgcgctcggcatcgaggaggtgccctacggcaggctcgacctgacgatcggcgccgtcgaccgggatcgggaggagaggggcctgccgccgctggcctagcgccttccaaaatataaccttcccggtcataggtatatcgagccgtccggatgagcctgcgagcgggcacggagggcgtggcgtagcctgcccgcgaactcatccgtacacaccgacaagccggcataccccctggccgtgaatcaaaacagggggtatgccgcattgcaaaacgtccggctaactgcgcaaacgcctatctaggagagaacgttcggatagcttcgcaattcaaccgaaaccacaatcatgaaccacccctctaaggtatgatttgcacagggcatataggccaatatctaccggcagcgtgcgctgcctttcgcttcgttcaaaagcagcagaacacttgccttagaatcacaacggtagaactacattccacctttctccctggttttcttcaacgagaagcattcgaaaaagtaataaacgaccaatgcgatcgaaccaaaaacgtagctccagccgccgtcgatcatgacaacgaaaataaagcaaatagccaataagagctctctaatggaatgggggaataagtttagtccaaacgatcgcgccagattaaattctgagataaggtttcttgtaactattcctgacagcatcgaaacggccagcagcacaaggttgtggaacaagaagaccgaaaaaaaggacaacacaacgctgacacacattgcaacaacatttgcaatgagtagtttgttttcctttcgaagagccttaaaatacggaacgcacagcatgctcattctgcaatcaaaaatgcagatgggaaacaagagtcctaaatatattagcgattggctatactgaggaagccaaaactcacagaatatgcaacacggaaaataaagcacgtatgcaatgggtaaaaaaagcgcaaggatgcttcggattttgacaaagttttctttttgggcttctttcgaagctctttttatatgcgggaacagcaccatagaaacctgaccggcaaatgaaatgacaaaagaaacaagggacacggcaaaagagtaatagccaaacgtcgctaaatcccagtttggctcgataagcatcctaccaaaaccgataataaaagtacctgcatagtaggaaatcatgattttcatgccagcgcctatatcgatcttggttgcatgaagcacatcacgattttttccggaaaacgaaaaacgagcctgcagtatttgacgaccgctatacaacagatacaccgtcgaaaaacactggctcacaatgtagaaagctactatgacacgataatcacctgcaccgagaactagggccgccacaatcattatgaaaaaggaggccttggtaataattgccgctttcgagaaaatttgcgttagattgaccgcctgaaaaacataggaaaggtagttggccagattcacgacaattgtgtatatggacaaagcggcggcaatcagacaaaactgggcactcaacctagcaagcaaggcaaaggcaatcaaaagcgccgaaaagaagaattccaggattagcaccagaaccatttgcgcttttatcccggcgtgatcaaggtccccgtaacgttgaccaccaatacgcaaatacaagccgtcgttaatcccgacaagaaggcacccagaataccctgcgtacagcaaaaaagactgccaatatgcatattcctccaccgcaaggattttggggacaatcagagacatcaagatactcgacaggagagcaacaccttgcgcgctaaacgcataggcaagatttttctttattccttggttttcctgaggcagcgccgtcattgtgggttttctctttccgcgttgaacgaggcaagaatcacagcgatgcacaggaacaagacgaacgtctgaagacctatgtaggacaacgaccgctccgctaagcaatagagcataaagtacgcaagaaatgcactgatcaattggttttgcatttgatttttagcataccgcgatttgtcaaacactacagcaagcatcagaagatatgacaatacgcctgtcagcccgaacatcagcagtaattcgacaatcgcattatgcgaccccgtatgcacagcccccaaaccattcgcagcatagacagattttattaagaaatagaccggactctcttcagaccaaaaatcaccatatccaaagccgaacaacggtgatgtttcaagaacgagctgcgaaatagatttccatattgttgttctccctgtgagatctgaggttttgccccaaatcgctagcacgtcagaaaatagcggaagtatcgccgtggcaaacaaaagaaaacccacgctgagaagaacccagaaagtcccttttcgttttagagaaaggactcccctcctatccaaaacgacgaaagccgctggcacaactgtgcaaattaatccaccaagcgcatctgccgacaagagcattcccccaaagcctagaagcatcaatacaagaatccaccgcggaatagatagcgttagactcttgtcctgtggcaaatagaccagcagtccgagtaaaaacagaatacagaatgcgataaaacccgcgcagacatttttcgttgtccatattcccgtaaaggctctcgttgtttcataatcgacaaacccatagcctggcagaaaaaaagcaagagagcagcagaggaagactatcgcaactgcaataaacacagatttgagcaggttttcaaggttgaacgaatcggccacagaaaaggcgaatagagccaacagcgcaagccgagcaacattccacaaaccagagctaggaacatattggctgataaaagacgatatcccaatgcagagaaaaaacagcacgacgctaaaaaaggggaaggtaattttcgttttcaaaatggcgccattaaccaaaaaatgccaagtaacatatgctgccatcatcgcataaacaagagcggtaagtggacttgtcaccataccgccaatgagcctatccaacgttccaggaaccccgaaaaggcggacgagcacgacggtcagcaataaacatctgaaccccgcccctttcccttttttcgttctaagctctatgatatgtagatctgcggcactcatcggaatagcacctttttgtatgaatcgattagtatatcgctagacttatcccagttatatttttcaagcctcagctcttcaaccgcctttacgcggttctcgtattcgtcgtcacaagcattgatcgattttcgaattacctcagccagtgactcaacatccccagaacgaaacaagtagccagttcttccagaatccgtttcctccacaaatgccggaatatcactggcaatcactggctttttataggaatatgccattagcaaggctccgctgccgtaaatattcaagtagggaaaaacgcagtaatcggcttcctgatgcagattttctaaatcattttcttcaacgaaacccggcctcaccaaaacgaacgattccacggagagctgtctcgatagctctaagtagtctgtggaattgtttttatctttcgcgccggcgatcacgattcgacagcgttttctgtaagaaggctccaacaaggccgcggcttggagcaggatatcgatacctttgttttttctcatcactcccagagaaagaaaacaaactggatctcgcttctcggcctttttggctggccttttcgagtaacagccgtgaggcataatcgtagccgcaggggccttgcttgaaagcgattgctctaactctgccttacttagaccattatgaactacaagcacatcacatttttcatagaagcggccatacgcctcggcctcgccggcttgtgcctcatgctgcacaacgttatgcaccgtaaaggccatcgttccaatcaagccgatttttttcaatgccgcgtaaaggggcatctcgatcgcatatttcttaaacgtctgaatgtgcacgacatcataactgtttaaggcgatattgactgtaaggcgaacgagccctatcaagtattcgatgtaagagagcacgcttcgatttccatgagaagtgttgaacaaaatcggatacagcctctcgcacttaacttctaaatcagagctcttcatatcatgcgaagttgcaaggaaaactctggccttggagccgagcgccatgcaaagttcagctgaataagaatttcccggaagcatgtgatcgatcattaaaatcttcattgaagacccgtttccaaaccctaatcagaccactcgattgaaaactcgtccgatatttccgacagaggaatttttcgccggaaagcttgctccacaagccgtacttttgaatatcctcgacccatcagagagtgattgtcccccgtgtcgcgaacatatatgctcgctttaaaaggaagaggttcgagcgggcgtccgagttctttgcaaatgcgagggatatcgccgtgcctcttacgaataatgtgcggattaaggttattagacgaggtcaacggttcgtaatgcttttcaggcaaatcttcagcggagtatttcactatcgttgaacttccatttggaaaatgagagccagacttcacgaagccattgccaacgtggtagaaatagccattttttgcatagaacccattcgatgattgatgagagttcgcaaatccagcaatcctgttgctctgaatatcgtctgcgtcgacaagcataacgaaaccgccacctaacgcacgcaccctcatggcgatctcatgaaccttatagcctttatccctcatcatcgcatcggggtctccgggaattgacgcatctacctcaataaactcaactctctcatcataggaatgcgcaagatgcggcttttcatgacaagccactataaccctgaaatcaggatcggtctggttgtataccgaccacaaggttctgttgaaaaacatctgaaccttttcccagtcgcttgacgcctttgcacttctaaggggaatgccgaatgtaatcattaatatctccccaagctgcaatattcgttcacgttaatattttccttgataatcctcgcaggaacgccagcgacagagcaattgctgggcacgtcatggatgaccactgcgtttgctccaataataacgttatcagaaatggttacttcgccaagaacctttgagccggtggcaatgtaaacattgttgccaatgacaggcgctcccggcttattggagcgcccccctattgtcacattcgtgcctattagcacatgttttccaatttttgcgttccttacaacgaccgtccctaaaccgccgtataggaacttgctgccctcgccaatctcgcagtcatatggcaccacgcaactatgaaacaagtaattgacgccctttaaaattttaggaaaaaaaggaatatgccgcagatagaaccatcgagatgctttatacataccatatgtgctcatgccactacctaactatcggaggcttcattcgccaattacagtcgccacagcgaccaacccaaagcagccgcttcgttgggattaataagtcccttcacatcaatgacgactcgctgctcgacaggaacagcttggctaaacaaagcatcccactcttcaacagacttctgtttgaattgttcatgagcaacagcaaggaccacgcagtcggcctgaaccgcctcaaaatccatcaagtcgacattgtagaaacgcctagcctcttccttgtcagcccatggatccaccaccgtcggaacaacgccgtagtcggcaagacccgcaataatgtcgactacctttgtgtttctgatatccggacagttctctttgaaggtaagccccatgatcactattcgcgcatccttcggagcttttccagctcgcacaagctgcttgattatcgcatccgcaacgaaaccgcccatatcgtcattcaccttgcggccagcaaggataatctgagaatgatagcccagtttctccgcctcgtatgtaaagtaataaggatcaatacctatgcagtggccaccgacgagacccggtctgaatcccaaggcattccatttggtattcattccgtcaattacctcattggtgtcaatgcccatgcgatcaaaaaccattgccagttcgttcatgaaggcaatattgatatctctctggctgttttcaacaactttaattgcctcagcggtcttaatggttgaaacaggataggtgccagccgctataacaatgttatagacattcttgatgtcctcaagagactccgcgtccataccggaaactatcttacggatcgtcgtcaaggtatgcacccggtcgcccgggttgatcctctcgggagagtaaccaactttgaaatcaatgccacatttcaggcccgactctctttccaaaatcggaacacaaacatcttcggtgacgcccggatagaccgtcgactcgaaaacaacaacagagccaggcatcaaccttggcccaagtgtctcacacgcaccgacaactggcgtcaaatcgggtgttttgtccaaattgatgggcgtgggaacagcaatgatgtggaacaaggcctctttaagtctctcaggatcatccgtaaactcgaccttgcactccctcagcgcttcggatccaacctcgtttgtcacatcaatgccattttcgtactggttgatcttccgtgaattgatgtcgtagccaaccacctgaacatgtttggagaactcaacggcgataggcatgcccacatagcccaaaccgataagggataactttgtctgcccttgcaccaactgctcataaacgctcacactcgttccctcctatcaagaattgaagcaataatccagcgcctcaataaagccagacgccatagcgccgatgctcatttctttggcgaaagtatccttgcagctttcggacatcttgccgagcctttcacgatcaacggaaaggccaactagttcggaaatgagctggttctcgtttttcgccacaaccccattttccccatcaacgacatactctttttcgggcccgtgaacaccttcgcttaacataaaaaagggcaagccccaaaacatggcctcgtttacggcaagtccagctgatccgggaacgctaaaaacatccgccaacgcgaacagctcgcaaacttcatcgccatagcgttctccaaaataataaaaattttcatgggagttcacggaggctaatacgtcatcggacataccaggccccgcaacaactaggcctatttgaggaaattcctttagcccctctgtaaggagctccaaccttcgattctgattgattctagccacgaacaaaacgacaaacgactgcgatatgccgtattttgccctcagagcatggttgtcgtactgggatctatcaattccagaaaaacttagcgtattgggagcaataaaaagcttgtgctggttctttttcttaaaatgcttccgcatgcagggcatatacgttataagggcatcgcactttgaatgaaccctatgaaatgctgcgttcttgacgatgttatttggatcggcaatgtttatgccatggttccaatagatgacctttatctgatgttttttgcagtagctaatcacatcaaacaggattccatctttgaggtgtaaaaacaaaatcactgcttcgggcttcttggcatcaatggccgctttccagtccttcagcgattcaagttttacgcaatcgaacctaataggattgacgtcatcctgaaacgaatctccggcaacgctaagagcataaccgtgttcttcaagtatcggcgcgaggtcattgtagaccttgactcgataatgcagcactttgttcgacaaaaggagaacttgtttcatctctaatcaaattcccccgcaaaatagcgctcataaccgtcgagcagcgcttgactggtatgcccccagctaagttcgttcacaacccggttgcggccgtattcgcccatggtcttgcgacgctctggatcctccaagagcttgacgaccttctctgccatgttcgcagggttgttgggctcagcatagaggcttgcatcctgagcgctaaaccgaccttcggtcaaatcaaactggacgatcggcttcgcaagggccatgtactctaaaatcttattcatggtcgacttgtcgttcataggattgaactcgtcgctgttcacgcaaatatctgctgtgttcaggtaacggagcaaatcttcatcgctcaccctgccggtgaactcaacacaatcgtcaagccccatgtcggacgacatcttacgcagcgcatccagatgcggcccgcctcccacaatcccccagaacacgtcatttcgggctttcttgataatcttcgcggcttccaagagatattcgatcccctcctgttgcccgataacacccaggtagccgaccatatacttcttgccacgcttgatgctctcgtcgctaggttgaatacgcatgcgctcaagtttcgggccgctgcgcaatacgattatgcgattcggatccattcctccacgctcaatggcgatgctccggtaactctcattggtcacaaatgcaaattttgcgttctggtacgtctttttttccagataggtctgactcttgtacagcatcttttttacaaggccaagctcttctttttttccgaatttggcctcgaagagttcggggcagatgtcgtgatgatcaaatacatagtcaacgccacggctcttgaacttcttggcaaccatatagatatcatcgggcgggttgcaaccatgaatgacgtcaaacccgtgttcccgatagacaatctccgcaagctcacgctgagccttaagagcgccgtagtattcccgcacgtacccgacaacgccattggcctcagggaggtcatgccggtaaatatgaacaccttctaactcttccatctcagctgttgcgccttttcctttcgggcaaatcacactaacttcgtagccattggccgcaagcgtcgtcgcttcctgccaaacacgggtgtcaaaaggaacgggaaggttttcaacaatgattagaatttttcgattttgctcactcactttttgaactccgggtatttcgagtaatcgatttcatcaataagccatgcgtattttccacgcttgtttgttcgcaactcctcgacttcacgaatttcaatgtctaggaggccttcgcattttctttcaaaataggcggccagagtatcgcggtcctcttccgcaaaaggctcgtccatgaccacgtctaagaacacatggcctgggcgatcttgaacatactgatacaagcgcaccttttcaaaggggccggaatgcggtgaaactgttcccttgtatatgcgtgcgccattctttgcaatgattctagcttccgacgtcgtatgaccacgaacctccatatggccattcttatcaattacgacataatcatcagtcgcataccttaccagaggcattttcttgctcagaaaacccgtggacacaatcctaaacacatccgattcatcggttgggagcagctcggtgtatccgtatagtcgattaattctatagccatccctgtctctctccaggaacgcacatctctcggtatggccgtagtaggtaatgcatgggcaatgaagcacctcttcgacttgccttcggtcagactctgacgaaccttctccgtaaaagaggacgaactttaaatctagctttttcttgtttctcctgatcaaatcacagagaaccgaaatagcagagggataacctgccacaacttcaggagaataggcttctatgatcccccaaacagaatcgaattcttcgctcttgaaaagcctaaacggcgaaatcacaatctcgtttttcaaaggcgaataatagtaatcggagtccttgttatgaccccagagagcaagggttctggttcgtcgtgcgtcgtagccaaacttctccataaaatggcaaaccacggcacgctcgcgatagattgacgcccgatcgagcaatacccgaaacacctttcctgtgcttcccgatgtatgcccctcataacaatcaatatcttcatcggagtagagcttatttccctgttcttgagctataaatttgtcaatgagagggactttttcaaaaccttcgaacgaagacatgtcttttgggttgaatccgatactgtcgaaaagctccttgtaatactccgtgtgctggtacgcatagacacactgcttcttcaattctctaaattgaattgccagctgatcctcctcagacatgcagtcaaagtcctcgagtcttttatgcatctctttatagtgagggtttccaatcattgcctgcacgaacaatggggccagcaaatgctttatgcccttgggcatattttcatacatgttcttaagtttttcgctattcattaatttcgtcctccgagccgatggcgagggcaatcatagataggcagagaggtcttcgtaacacaatcctgcaactttggcagcatcaagcagcattgaaacggcagtcatgcctggaagagtggttgctcgcttttcaagtgactggaaataattagccatacttaactactcacccttatggttgatttcaaaattcccgaaaagcggtatttaattttctttccaggctgaagaactccataatttgcagaaaatgatgctttttcaactgacggatcgataccagaagattcgatttgcccgctcacatcacccaacttaaatgcaatccctccttcccccctgcttaaaacaagagattcaggacaagcaaaaatcgcatccccacaaaagccatcacctgcatcattaaataattcatctcggatcgccaggaatcgccgcccgtcaaactcaaaggtacggcggtgaaccaacggcgcatagccatcgtgctctgcaacgagttcgacgccaccgtcgtctctctcctcgtaactcaacaacttgcagtttgcctttcggccccacagaaaggcgccgagcatttccgactggtcttttccgtcagcacagacagtgttgtggtttgacgttttgcgcaagctgttgcgcatgggcagattgcaatggtagatatatgtgccagggtcgatgaagaccggactcccatctacaaacatttgaaagctcagggcgtctgcatgaccgtgagcggcaatgcttccaaagcccaaggcagcatggtcgattcctataagaatgcgcccgtcgcgactcttgagaatggtgttgccgccctccctgtagcaggcattatgggcgttgtcgtagagcggtttacgcttagccccaccaatctcgctctcatcgaaaagccaatgcagggtttcatcggtttgctccatcgcgtcatagcgctcgtcgagcagcgtgctcatgaactggaggatgtaggcataccggtctgctccttttccaaccagatccaggatttttccctcgtcgtcgtctccaaaaacgaccacttcgccaaaagccccgcggcagtccgacacgtagcgacactgcttcttcagcatggaagcccattcgactgggatggaccctccgtttttaagaagcagattgccgacaagggcgtaggcctccatcgcgaaaacctgatagtgaagactgagctccttattgacgccatcgccgtagttctggcgctcgagctcctccgtcaatatctcaatggccaacgtcacccacggcttatacgaaaatgcgaacccagcgatgcctatagcggcagcctctaccagcaggtgattgttcgcagagctgaatcggctcctatgctgctcgatgtggtcgaccatgttgattgcgccgaccgcaagctttctcttcagctctagctcgtccacatcctccaggaacgccaaggtgtacatccaattgatcgccctgatcgccagctccataacacttgtccagctgatgccaaccaggaaagggttctgcttatcccaatcgttaagctggtctttcaaatcatgaagatatcgctcgtcccccgaggccctgtagttctttgcgagaatggcgaactggaagtgcctgttcaattcccagttcgttcttgcgtcgcctatttcgtctcgctgcctgtattccagcgaataggcgaattgctgtggccattcgttctccgtctggaagccagcatgccatttgcccttgaagtcctcgtatttaaaccccagcaggttgatatcctcattcaagccatagctagtattctccaaattcagatggagcgccgcggcataaaacttgaggctgacatacttggaagaaagcacttcgtcgcaggcgcttacgcgcgaatctgcgaatcgcctcttctctttgttctgcaggctcttttgctgaagcctccatgcaatttcagcaggactcatcgccttcagcctatttaccaaccatttgatgcctaccacgtcgtaaagtccctagaactcggtctttgccatatcagcttcaatggcttcggcttgggaggcgttgctgttgatgttgccccagctaatgccttcatagttgccttcatagtccaagctgtcccacatacgagccaagtcaacgatggctttgccaggatactgctgagggatgtcagagaattccttttctttgttggttacgaccagaacgtccgatccagaacaaacggcatcgaggtcatcggtcacgaactcatacatgaagggaatcttggacatgatgaagtctttgttcgtgttggtgtcgctggaaaccttcacgttcctatcgtagatgcttacctggtatcccttgcccagcaagccttcgataacatcgacgattgggctgcaacgcagatcgtctgtgccgctcttgaagctgaggcccaggatgccgactttgcgacggcccttggactcaatgattttcaaagcccgctgcttctggagctcatttgacgggttgatggcatttatcactgggacgtcaatatagttgtcgtgtgccaaggtacgcagggccttagaatccttgggaaggcagctgccgccgtaggcaaagcccggcttgaaataacaggggctgatgttgagctgctcgtccttgcagaagatctccatgaccttatgggagtcgatgtccaaagctttgcatatattgccaacctcgttcgcaaagacgattttcaggccgtggtatgtgttgttcacatacttcatgatttctgccacaggaacgtcggtagtaataaattcagcgggaatgtccttgtaaagctcgcgcatcatttgctcagccttagggctagcggtgcccacaaggctcaggggcggattcagataatccttgacggccgttccttcgcggaggaattcagggttggagaccatcgcaaagccggagccttccttcttgccggaagcttcctcgatgattcgagccacattggcgttggttcccggcagcacagttgaacggattgcgaccacatgaaaatcgtccttcttcgcaatcgcctcaccgatctgccgcgcagtttcaaagatgtagtcgagtttcaagtggccttgcggcgttgaaggtgttcccacggcaatgaaggatatgtcactgttaacaacggcatagtcagcgtcagtggtagcttccagcctgccggcttcgtgcgcctctttcaccaagtcatcgatttcagcctcgattatggtggcgcgaccttcgttgataaggttcactttgttctcaacaggatccgtgccaataacgtggtgtcccagctttgcgcaacaagctgctcccacgcagccaacatagcctagaccgaaaatgctaatgttcatttacgcttcctttcaaaaccggcctagcggctaatcgtcccagtaattcccaaatcgccggatgtcttcctcttcaaggacatcgccgagctgcacttctatcacgtgcagatccctgaaagctctcactgaatgcttgactcctttagcgacttgaatcacgtcgccgcatttcgcatctgcaacaacgtcgtctaaaaccacttgcccgctaccgctcacaatggtccatatttcgcttcggtgctcatgaagctgatagctcagctgctttccagcaccaatgatcaactcttttgtcagagccttattgccgtctgggtataggccgacgtctataactctatattcgccccaacggcggctctcgtacatcggacgactggcggcagcttcttcaacctgtttctttatgtaggcgctttcctgcttacccgaaacaagaattccgtcatgcgttgcaataaccacagcatcgctgatgccagctacgactaacggcaacccggtttcattaatcacgtgcagtttttcgcaggttttctcatcgataaccgcacggccagaatagttgtcggccatctcctcagacaaggtattccaggtgcccaagtctttccagctggcgtcacaaggaaccacagctaccgattcagccttctcgaccacctcatagtcgaaggaattcttgggcaagtctgagtaatgggcaacaagctcatcaaagtctttgatatcggtatatacggacaatatgtccaccatgtaccgcaacttgaaagcaaacacgccgcagttccacagagcgcctttttcgataagctcctgcgccatctccttagccggcttttcctgaaaagtggataccttctgcacagcgtcttttgaagtggtcggaacgatgtaaccgtacttcgttgaaggaaaactaggcttcacgcccataagcgtaagttcagcgacgtcttgttgtaccgtaaaatcaagttttaagagagttgcgtagtagccatcatccgcgtaggtatcaataggcattacgactacggtctcatctggcgaaacgccttttctgtaagccaggttcgcacaagcaagcatgatagcggacgccgtatccctacgctcgggctcgactaccacatcgcagctgtcttcgagctgcatcgcgattgactgcacctgggtggcgcacgtagcgatagtgatttttgccgtcggagcgacagaggaaatcttcctgtatgtacgctgcaccatagactccgatttaccattggagttgcgcaggactttaagaaactgcttgcttctggagttgttggagagcggccagagacgtgttcccgatccaccggagagaaggattatttgcattacataccgctagcttccctgcattgtcagcacgacgccgacggtctgaataatgagtttaaagtcgctccagacactgcacttcttgatgtagagcaggtcaaggtcgatccattcgtcaaaagtgacggtgtcgcggttgcgacgggtctgccaatagcaggtgatgcccggcttcaccagcaaacgttggcgttgatagtcgtcgtatgttgccacttccttcggcaaagccggacgcgggcctacgatggacattttcccagttaaaacatcgaaaaattggatggtttcgtcaagtgaggcctttctcagaacacgtcccacgcgagtgttgcggggatcccgggcaatcttgaagactgggccatccttttcattgagggcttgcaactccggcagtttatcctccgcatccacgcacatagtgcggaacttgtgcatggtgaaggtcttgccgtccttccctacacgttcctgtttgaacagcaccgggcccttcggatcatcgatcttgataacgatggcaataatggcaaacagccagcagaagcagatcagcacggcggcgctgaaaacgatgtcgaaggcgcgcttgatagcacagtagaccggtcggctctcgatgcccgtcagtggctcgtcgccgatctccgcgcggatcctcttggcgcgtgcagcgctgctagggctagcagtttcctcggctcccacgtcaaaggcgtaaccgcggtgatagctccattcgccttcgacggcagcctcctgcgtttcttctttgtccaagtcagcttcggaaagcttaatagcccctccgccatccatgctcgcggcagtttgcgcttcgctcatgcctacgtcaccgtctgtcgacggcccaagtagtccatggcgccgaaagccggatagcgaacaccatccgttcgccgggaggaagacacagcacggtggcagcggtagtccggcccgccacccaccttgtgctcctcgagccccatgacgtcgtcgccgggcagcagcaccttaagggcacctcgtgggacggggctctcgatcgcctcatcgtacccgatagcacccgaccccatctccagcacctcatccatctctatttcgttgtcaagcacgtcttccatgttcgccctaccgggccatccctgtccttatcgcttccgtactattcccaggccgatcttggtctggatcgtcctgccgaacatctctatctccaaatacgcggtgcgtttgcggcggttgatcttcctgatccagccggtgcggttcaccagcgggcccttcaggacgactatctggtcgccttctatcacgccttccgacatgccgatcacgcggtgctccttctcggtgaaggcgtcgatccaagccacctcgtgcggttccaggggaatgaacgtgccgtcgttgttcaagacgctcgcgaactgggggatctgcttcagctgcgcctgcagctcggcaatatggtcgctcaccacgatcaggtagccggggaacagcacggcggtgcaggtgcgccactcgccgcgcaggtgcttctgcacctcgtactgggggacgaagcattcgtcgagcacatcgtcgctcgcgaactgctcgatctggcgctggacggcgaactcccgcccggccatcgtttgaaccacataccacatacgcacacctcctcgcgccatctcgggtcgactgcgcgaggccacggcttcgccccttggccctctcgggcgcggggcataccgcttcaagcttcgcgacggctattcattcccaagaggctggccgaaacgcacacgtggcatcgttttcgcgcatcaaggtatgtcgaaaaggttcgcgccccttgcgaggcgcctgcagtttcctgcagggagatcggtgcggcgccgtcggcgccaggaccggcctccctgcaaaaagctgccttgccgcaggtcaggctcctgctagcagcggagccccaatcgtcacgtcttcctggtgatctcgagccccacccgcacccgcacctggtcgagcagccccacgtccagaaacgccacccgcttgtgccggtcgatcttgcggatgaggtcctccctcccccgcaaggggccgctgcgcaccacggtgcgcccgtcctctatcacgccctcggacatgcccaccacatgccccgcacccccgaactcggagacgaaggccgcctcctcgggcgtgagggagaagatggcgtcgcccgcgcccagaaggcgtgcgaaggaggtggacagcttcaggcgctcgcgcacggcgtcgatgtcgcccgtggccaggaacacgtagccggggaacatgacctcggtcacaaggcgccacgcgccctgctgcttcttgagcagctcatagcgcaagggaaagcacgcgctcagaagctccgggcccacgaggctcgccgcgcgctccgccatggactgctcctggccggggaccacctgcagcacgttccagcccacggacgcgggcatgcgaacgccgcgggctgcctcgcccgcggcgtcaatcgatgaggttgtgggaagttcggaggtgcgccggcttagccggccgggttcgatgcgccgctcgcggcaccctctttcagagcgcccccccgtggggcatttttaggcgatcggcttcggcggcaggggcagccgcgggcatgagggcagagcgatccgcgggcgcaaagatgcgtccatcgagcgagtcttttgtgggagtcgccacgctcatgtctcgaacctatctggtaaacgtcgaagcgccgaagcgcacaggatcattcgtgttccgcatcaagatggtaacagagcataaacgatctagcaattagaaaacaccccctccccctgctgctttcgcattcatttcgcacagtaaccacagccgggagcagtaagggcgcggaaaagaccgccgggccgccttccgctcgccggcatggggatgccgctggcttcacggtccttccgctcgcgcagcgacgcagagccatccgccgtcgactcttccaggcaacaggtcgtcaacggtatcttagaaccatggcattatgaagtgccagctcgcgagcaacggaaaatccgcgacaggaagggagtccccatggctccgctcgtgctcacctcctacaaggtctaatcgcgtcgtgcgcctcctccggcgcgattagacccccccccccccagcaccgattttcgccaagccccaaggggccgggcgaagcacgtcgaaaggaagcctcatgccttggttcgaccaagcgccctggctcgtcgccctggcgccgttcctcggtctgctcctctccgcgttcaccaagaggacagaccccttcttatccggcgaccgggtatttcgccacgacgctcccgcgcgcatctcccattgggcccatgccgcaggcacgaccgtctgccttgtctcgggcatcatcttgggcctgcggttcacccccgcgttcgtcgacgacggcccggcggccattgtctggcagaacgtgcacttcgtggccgcggtcgtgttcctgttcgggacgttctactacctgggcaacacgatcgtgtctcagtggcggctgcacgagcacctgcccacgaagaacgtcgtgtcctacaccgtccgccactacagcctgctcgtgggcatcaagaagttcacgatgccgcccgaggacaagtacttcgaaagcgagaaggccgcctacgtcatggccgtggtcacggccgcgctgctggtggtcagcggcctgttcaaagcggcggcacacgtgttcctcgcactgcccgacggcctgatgaacgtcatgttctggatccacgacatcgccgccgccctcatgctggtgttcctggcagcccatgtgttcttcgccgtcatcgcgccgttctcctggaagacgttcccgtccatgttcacgggctggatgccgctttccgaggccgagaaggagcaccggggatggctcgatcggttgcagcgcgagcatgacgagcgcactgccggcgagggctcctgcgaaagaaccgcgcccgcgacagcccccgacacgacgatgaccgcggcgcccgcaacgggcacgcccgggtctcaaaggagatgagagagatggcagatacgaacgaacgcgcggcaggcgcgcagaggaagagcggcctttcgcggcgccagttcctcgccggcatcggcgggctgggcatcggcgtggtgctgggcggcggcataacggcgctgctcttgccggacgacgtgtacgccatcgaggcgagccaaggctacctgctggtcgacgcgaagaagtgcgccggctgcgagacctgcgtcatcgcatgctcgctctcgcacctgggacgcatcaacacctcgctttcgcgcatacaggtgatgaagaacgccctgggcagcttccccacgaacgacgtgcagcagaaccagtgccgccagtgcccctacccctcctgcgtggaagcttgccccgtgggcgccatgcatgccgatccggacacgggcgtgcgcctggtggacgagggcaagtgcatcggctgcgagcgctgcgtggaggcgtgccccttcacgccgtcgcgcgtgcagtggaacttcgaggacaagcacgcgcagaagtgcgacctgtgcaagaacacgccctactgggacgaggcgggcggcgtcggcggcaagcagctgtgcgtggagatctgccccatgaaggccatcagcttcacgaacgagctgccggtgcagaccgacgagggctacacggccaacctgcgcaacgaccattacctggagataggcctgccgagcgacgacgaggcgcgcatcccgccggcccggctcgggtacggcgccggaggcacggcggcccaggcggcagccggatcgaacgagaagtaggaggagcaccatgaccgaacactacggctacgccggcaagatactcatcgtgaacctggacgaccggacgtccgagaccatcgacaccgacccctatatcgaatgggtgggcggccacgggatggcctcgaagctgttctgggactactgcgaggacaagaccgtggaagccgtcgacccgaagaacgtgctcgtgttcgccaccacgccgttctcgggcgccgtggtcccggccgcgtcggcgcgctgcgagttcacgggcatcagcccgttctcgctgcccgaatggtacaaccgttccagcatgggcggccgcctggccggcatgatgaaggaagcgggctacgacgcctgcgtcgtgcgcggcaaggccgacgcgcccgtatggatcagcgtggtgaacgaccaggtgacgttcaacgacgccaccgacctctggagcctcgacgccttcgagtgccaggagcgcatctgggacgaggtgacgcacggcacgccgcaaggctcatggtacgagctcacgggcagccgcgacggcgggcgcacgacgcagcgcccctccgtcatctgcatcgggccggccggcgagaacctcgcgcgcgtgtcgtgcatcgtgcatgacgccggccacgtgacgggccagagcggcttcggcgcggtgttcggcgcgaagaacctgaaggccatgagcttcatcggctctaagagcatccccatcgccgaccccgccgcgctcgtgcgcctgcgcctcgaggtgcagcagaagttcggctacgacatcgacgccggcaaggtgccgggcgcgccgggcagcccgggagccgcatccaccgtgctggacacaagccccacggtatcgcgcgccgagggctgccgcgggtgcttcaagaactgccgcaacctctaccccggcggcgtgggcaacgagctgacctgctcggccggcctctacttcaccgactcgggcaagatcgacgagcagctggccgcctacagcctgctgtcgaagctgggcctgaacggctacgagatcgacatgcccgtgtacttgcacaacctgtacaagatgggcgtcatgggcaagggcaaggacatcgacaccgacctgcccttcgagaagtacgggacctacgcgttcatcgaggagctgctgatgcgcatcgcctaccgccgcgagatcggcgacgatctggccgagggcatcgcgcgcgccgcgcagaagtgggggcgctgggacgaggacacgtccacgggcctgctcgcgcgcccgaactggggctactgcgagcacaacgagccgcgcgccgaggtggagtggagctacggcagcatcttcagcgagcgcgacatcaacgagcacggcgtgcacaacgcggtgtacaacacctccatcatggcggtgctcaccggcgccgagccgcccgtgtcggccgagaacatggccaagcagctggccgaccagtccggcctgggcgacccgctgtgcttcgactggagcgaggagggcatctacaccgacgcgcgcgtgcgcgagatccactggaaccgggcctacgggcgtttctggctgcagtcgctcggcatgtgcgactgggtgtggccgaacttcgtcagccgcaagcacaccgccgagacgggctcgacctacggcgccacgcccgagtacgaggtgaagttcttccaggccgtcaccgggcgcgacctctcctacgaggagagcatcgagctggggcacaagttctgggtgctcgaccgcgccatctgggcgctcgagggacgccaccgcgaccaggaggtgttcgcgaactacgtgtacgacgtgaagaccacgaagcccttcccgctcgtggtgtgcgaaaacggaacgtggagctattcgctgtgccagggccgcacgctcgaccgcgagaagttcgaggacttcaagtcgcggttctacgtgcacgagggcttcgaggagtccaccgggcgcccgacgcgggccggcctggagacgttggggctgggctttgccgccgacgcgctcgagaccgccgggaagctgggatcgtgagcggggcagacgtcgccgagcgtgccgtcggggaagagggagcggacgtcgccgctcccttcccgcccgggggcgaaggcgcgatgctcgaggagatccccggtttggccgaggcatgccggcgcttcccgatgcccgacggcgcgcaggccgagcgtgcgctgcgggagctctcctggggagagcacttcgtggcgggacgcatggtgccctcgaaaggcgggtccgacctgtacctttacaatctgaagagcgccgccgtgttcctgctcgatcgcgaccaggcgaacatcggcaaggcgtcggaccagatcatcaagctcatcgacgtggatgcgttcgccgcatgggtgcgcggaacggtgggcgacgaggcgctggccgacgcgctggccgaggaatgcccggcggaggacccgtaccacgaccgactgcagggcgtccagcggctgctcgcgctgcgcatggtgcagtacggggcattagagggagccaggggcggcaccgagggcgacgagcacgacagggcaccccttggcgaaggcgcggcatcgctatgacgcgggagggcgcgcatccgtcgccaccctccggcgcgctcgccgcgccggaggacttccccttgctcgcgcacgaggccgccggggacggcggcctcgtgtacctggacagcgccgccacgacgcagaagccttcctgcgtgctggagaccctcgacgccttttaccgcacggtcaacgcgaacccccaccgcggggcgcaccgcttgggcacggcggcaacggaggccctcgaggctgcgcggcgcgatgtggcccgcctcgtgggcgccgacgccgacgagattgccttcacgagcgggacgacgtgcgccctcaaccagctggcctacggcctggcggggctgctgcacccaggcgacgaggttgccgtgtcgcttctggagcaccacagcaacctcgtgccgtggctcacggtagcgcggatcgcaggggcgaaagtgcgccatatcgtgcccgaccggcaagggcgcatccccgacgacgagatcgaccgcgtcataggtccgcgcacgcgcatcgttgccgtgtcgcacgtgtcgaacgtgctcggctgcatccaaccggtggagcgcatcgtccgcgcggcacgcggcgcggacgcgctcgtcgtgctcgactgcgcccagagcgtggcccacctgcccgtcgatttgcatgtgctcggcgcggacttcgcggcgttctcgggccacaagatgtacggcccgatgggcgtgggcgcgctgtacgcgcgacgcggcgccgccgtggcgctccagcctcttctgcgcggaggcggcatggtggaggccgtgttcgagcagggtttcacgttcaagggcttccccgcaggtctcgaggcgggcacgccgaacgccgcgggcgccatcgggatggccgccgcggcgcgctttctggagggtctgggcatggaggctgtgcacgcccacggcgagacgctcgcccgccgcatggccgccggcctggcggccatcccgtcggcgcgcctctacggccccggaccgggcggggcggaggagcgctgcggcatcgtggctttcaacgtgcgcggcgtgggcgccgacctggcggcgcacgccctggaccggcgcaacgtggcggtgcgctcgggcgcccactgcgcccagcccctggtgcgccacctgggcgcggaggccgtctgccgcgccagcgccggcgtctacacctccgagcgcgacgtcgaccgcttcctcgaggccgtggaggcggcgcgccaggacgcggcgagcctcatggcggcggcgatgctgtagggagggaagcggcggcgcctccctccctacagcgccctccacgtggggcggtccaccgcgcgcacgttgatgtagacgaccgtggggttctcctccatgatcttcagcacgacgcgctccttgtcgcggatgtcctcggccttgccgaacgctatctccacgttgtcgtccagcgtgagcgtggtgccctcggcatcggtggccgacaccttcgtcacgcggcccgcgagctcggtggtcatgcccgacacgatgtcgagcgcgttgttcacgttgtcgtcggagcagtacgtgccgatctcggccttcgtgccgtagggcacgtcggtgatggacagcacggccgcggcgtcctcgtagaccttggggctggtcctcttgcccgcctcggagtcctggtcggggatgggcatgagccacatatggtccgacgcgatggcccactgcttcacggacttggcgtcctcggtgggcacggccaccacggccgcgatggtgcgctcggtcacggccagctccagcgtgttcgggaacacgcgcttcacctcggcgtcggccacccaggcgttcttgagcaggcgctcgcggatgccggcggcgtccacgcgcaggagcgtggtgttcgcgggcacgttcgccatggccgtcatgtcctcggtggtgagatgctccacgccgctcacggtgacgttctccacggcgaacaggctggaattgtacgcgacgacggcgccgatgacgagcgcggccacgagcgaggcgaccacggcgaggcgcacgacatggcggcggtacgtgctctgcgcgcggctcgcccgctcggcgcggtcgaggtcgcccacgcgtaccgaggtcaggcgctgctgcgggtatccgccggagccggcggcgggatagcgcccgccgggcatggcgcggtaggcgccctgctgcgaggggcgggaggaccgtccggccggggcgcggccagcgctgctgcgggcggcaccgcgtcccgacggccgggacgcagacgacgacgcgcgggcgccccggccgggcgtcgtcgccccgcgggccttacgcgaacccgaggaagcggacttccggttgtaattcgatgccatacgtttcgcttaccttcgcctgtacgagttcgatgaggtccttcacgtcgcgcgccgtggcgtcgcccgtgttcacgatgaagttcgcatgcagctccgacacctgggcgccgccgatccgcatgcccttgagcccggcgcgctccacgagcgacccggccgactcccccggcgggttgcggaacacgctgccgcacgagggatccgtgagcggctgcgtcttcttccgccgcgccagcgacgcctccatcttaccgcggatgaagaacggatcggccggctctacggaaagttcgcattccacgatgacctcgtccggcgcgaacgagctggtgcggtagtcccagccgatctcgtcgccggcgcgtcgcgcgaggccccgcccgggcgagagcgtggtcacggacgccacgcgcgcgccgatccactcgtcgcgcgagccggcgttcatgcgcagcgcgccgcccacggtgcccggcgtgcccacggcgaactccagccccgcaagcgagcggcggaacgcctcctgcaccaccgacgacagcggcacgcccgcacccacgcagaaccggccggcctcctcgtcgaagcggcaggtgcggaagtcgcgcccgagcgtgaccaccacgccgggaaagccctcgtcggccaccagcaggttgctcccgcgtcccaccacgacccagggcacgcccgtgcgctcgcacacctcgacaagccgcacgagcgcgcccacggaggccgtctgcacgtagaagcgcgcagggccgccgatgcggtacatggtgtggcgcgccatgggctccgccggatagacgtcgccgtcgaagcggtcgtccacgagcagcgcctcgagctcggtggtatggcgtgcggacacggcccgcctcacctcccggcggcgccgggagcgccggccgccccggcggccccggccgcgagcgcgtccacgagctgcggcccgatggccgtcacgtcgcccgcgcccatggtgatgaccaggtcgccctccgcggccttcgccgccaggtacggcaccacctccacgcggcgcggcacgtaggccgcctcggggtgccccgcatggtccagcaccacgttcaggaacgtcttgccgctcacgccgggcacgggcgcctcgcccgccgggtacacgtccatgaacgtgacggtgtcggccgcgtcgaacgcgctgccgaactcgtccttcagcacctcggtgaacagcggcacgcgcgagtagcggtgcggctggaacagcacgtgcacgtggcggaagcccagctgcgacgccgcgccgatggtggcggcgatctcggtgggatggtgcgcgtagtcgtccaccacggtgatgccggcagcctcgcccacgaggtcgaagcggcggcgcaccccggcgaacccggccatggcgcgggcagcggcctcggcgtccatgccgagcgcgtccgcgagcacgatgacgccggcggcgttcagcacgttgtggcggcccgggttctgcttgacgtgggcggacagctggcggccgtcgggcagggccagcacgaaatcgctgcccacgccctgcggctcgaaggacacgatgcgcgcgtcgcagccttcgccgaagccgtacgtgaccagcgtgcggcccgcggcgcgcgcaagcgccgcaagctgctcgtcgtcgccgcaggccaccaccacgccgccgtccgcaggcaccgagccgatgaacgcggcgaacttctcgtagatctcgtcgaggtcgcggtagtggtccaggtggtcggcctcgatgttcgtcacgagcaccgcgcgcggcgacaggtacgtgaacgacttgtcgctctcgtcggcctccaccacgtagtgccggcccgaccccgagtgcgcgttcgtgccgtaggagcgcacgatgccgccgatgaggaacgtggggtcctcgcccatggcgtccagcacgctggccagcatggacgacgtggtggtcttgccgtgcgtgcccgccacggcaagcgtctccaggtcgcggcccaggtgcgcgagcatctgcgcacggtgccagatggccaggccccgctccttggcggcgatgagctcggggttgttgtccaggatggccgtggacaccaccaccacgtcgggcgaggcgtcgtcgcgcccggggccgcccggcaggttggccgggtcgtggccgatgcgcacgtcgatgccggcggccttcagctgcttggtgtagcggctctccttgagatccgacccgctcacgcgcaggccctggtcgaaggcgacgcgcgcgatgccgctcatgcccaccccgcccacgccgacgaagtgaaccgattctatgcgctgtgtgtccatgatatccttaactgcccttccctcgggtgcgcttccatggtagccaacgttcgctaccgcgcggcccccatcacaacatctgccaatttggcggccgcgtcggccgtcttctgcgcgcgcgccgcagcggccatgcgctcccgcacggccgcgtcgtccaggagcgagcgcacgagccgcgcgaactccggcccctccacgtcggcgtccgccagcatgtacgcgcagcccgcctccacgtaggcgcgcgcgttcgtggtctggtggtcctccgtggcgaatgggaacggaacgagcagcgccgggatggcgcgcgccgatatctccgcgagcgacgtggcccccgcgcgcgacacgatggcgtcggcggcggccatggcctcgcccatatggtccgtgtagccgaacaggtgccaccgcttctcctcggcgggcgtgagcgccagctgcccggcgacggcgtcgagctccttcgggcccgtcacgtggacgacgtgcacgtcgccggcggccagcagctcgtccttcagcgcgcagacggcctggttcaggtggcgcgcgcccaggctgccgcccgtcaccagcagaaggcgcgcgtcctcgggcacgccgaagcgcgcgcgcccgtcctcgcgcgtggcatcgaacacgctcttgcgcacgggattgcccgtgacggcgatgcgcgagcgcgcgccttcgtcgagcgcaccggccgcatgttcgtaggtcaggcacacggcggcggcccgcttcgccaggtacttgttcgccatgcccatgaccgagttctgctcgtgcaccaccacgggcacgcccagcttctcggccgctcgccccaccgggatgcacacgtagccgccgaagcccaccacgacgtcggcgccgagctcggcgagccacgccttcgcgcgcccggtgctccgctgtatcttcgccacggccttcggcagcgtgagcggatggttgcggttgaaccccgccgcctcgaacggcgtgaacgggatgcccgcctcggccacgagccgcgcctccacgccctggggcgtgccggcgaagcgcacgtcgcaaccgcgggcccgaagctcgtcggccagcgcgagcgccgggttgatatggccggcggtcccgccgccggaaagtacgaccaacatgcttacctcctgcctcggcgcgccgacgagccggatgcacccgaccgccccgcgcccgcgttgtcgcgccgcctcgagcgcgagctcaccgcgtcccacccgatgccgtcggacgatgccgacgacgaagccgtcccgccgcgcctgcccgcgcgcccggaaccgcccgtgccagcgcctccgcggctgccgccggagcgcggctcgtccggctcggcgcgcacgacgcgcaggtcggcacgccgccgcgcaggtgcgagcgagtcgtccaccgccccctgcgacacggacaggatgagcgccaccatgataaacgtggcgatgagcgacgagcctcccgacgagatgaacggcagcggcttgcccacgacggggaaccagcccatgaccatggcaatgttgaggaacgcctggaacacgatcatgatggtgcagccgcccgccaccatggtgccgaagttgtcgggagccgtgcgcgcgatgcgcatgcccgcccacagcacgagcaggaacagcgcgatcaccgcaagcgcgcccaccagcccaagctcctcgccgatgatggcgaagatgaagtcggtgtcggactgcgtgaggtacaggtacttctcgtgcgagttgcccagccccacgccgaagagccctccgccggcaagcgcgtagagcgaatggatgagctggtagccgttgccgtagcccccctcgccgtcgttccacggattcaagaacaccatcaggcgctcgcggcggtactccgtgcccaagatgcccaccaggcccagcgccaccaccacgcctaccacgatgagcatggtccgcgcgggaacctcgcccagccacatggccgcaaggatgcccacgacgcagatcatggccgtgcccaggtcggactgggggcctaagatgacgagcaccggcgccagcaccagcaagaacaccatcacgaagaactgaggcacggaaagcgccccctcgcggaagtcgtcgaagagccgcgcggccacgagcacgagcgcgatcttcgcgaactcggagggctgcaggctggccggccccagcacgagccagcgctgggcgccccactcgtcctcgcccgcccccgagaacatggtggccaccagcagcacgaacgcgagcagccacacggcccacaccaggttgccgcgccaaatggaataggggacgaacttccacaccaccagcgcgatcacgatgcccgcaacggcgaacttgatctggctgagcgtgtcggccatggggtcgaccgtcgccaccgcatcggccgacgcggacgccaacgcgatgaccgacgacgtggagtagatcatgacgaagccgagcagcgtgagcgccagcacggacagcatgagcacgagccgggggcccatgatatacgcaggtatcccctgcttgtcgacgcgtgcggcggacatgggccctttacgcttccacgcgcgcggagcgttcggccacgagcgccttgaacgcacggccgcgctcctcgtacgagccgaactcgtcgaacgacgcgcaggccggcgacagcagcacgacgtcgcccgcacccgcgatggccagcgccgcgtcgagggcgtcttccaagcaggaggcttggagcacggcgaagtcgccgccgtcttcgcccgcagacccgtcgaccccgaacgcagccgcgaagcgctcgcgggcggcgccgaagcacacggccgcgcgggcgtgggcgcgggcggcctccacgaggggggccaggtcggtgcccttgtcgtcgccgccgagcagcacgatggggcgcgcctcggggaacgcggccagcgccgtgagcgtcgcgtcgacgttcgtggccttggagtcgttgtagcagcttgcgccggctacggtgccgcagggctctatgcggtgctcgagcggcttgaacgagcgcaggtgcgccgccacgtcggcggcgtccacgccgagcgcgagcgcggcggctgccacggccagcgcgttcgaggcgttgtgcgcgcccttgacctgcaagtcgccggcacgccccgcccggtgctcctccccgcccagcgccacgcgcagcgtgccgtcggcatcgaggaacgcggcgttgtcgctgccgcaccgtgcgcgcatgtcgccgcccaggccctcggccgtgcccatcggcacgtacgcgaagccgcgcccgtgctcgcccagcgcgcgcaggcggcgcacctcggcgcgcacgacgtcgttcgtcgcgtcgagcacggccacggcccccggcaccccgggcaggttcgccagcagcttgagcttcgcgtcgcggtacgcctcgaagctgcgatgccagtgcaggtggtcgggcgtgatgttcagcagcacggccacgttcggcgcgaagcgcaccgtggacgccagctggtaggacgacacctcggccacgtacacgtccgtggcgcccgcgcccaccgcgcagatgcacgggtcgccgatgttgcccacggccgcggcggccaggccggcgcccgccagcacgtgcgcggcgagcgcgcagaccgtcgtcttgccgttcgtgcccgtcacggccacccagcggctgtcggcggcgctctcgcgccaggcgaactccacctcgctcaccagctcggccgacgcatccgcagccgcctcgtagaacgccgagaactgcgggatgccggggctcgctacgccgaggtcgaacgacccgcccgcctgcgcggccagctccgtcacggcctcgtcgccgaacgtcacgagcgccccgcgcgccgccgcctcggccgcgaacgcctcggaggcctccgtgcgcgcgccggccgccaccgcgagcgcgtccacgcgcccgcccagaagcggcagcaggtactccacggccgcccggccgctcttccccagccccaaaacgagcacgcgcccgaggtgctgcggcgcgtgcttccttcccggtatcaggtccccgcgcgccatccgctacgccaccgccatgagcgtctgggcgaagtacagcgagaagccgcaggccgccagcacgcccgacacgatccagaagcgcacgaccaccttcgtctcgctccaccccttcttctcgaaatgatggtgcagcggcgccatgaggaagatgcgcttcctcgtcttcttgtagtagaacacctggatcatgacggacagggcctcggccacgaacaggccgccgatgatgatggacacgaactcagtcttcgtgagcacggccaagcagcccagcgccatgccgagcgcgagcgagccggtgtcgcccatgaagatgtcggccgggaacgagttgaaccacagaaagccgatgcacgcgcccgcgagcgccgccgcgaagatggcgggctccagcaggtcggagcggtacgcgatggcggccatgactatcatcacgatcatcacggtgccagccgccaagccgtccaggccgtcggtgaggttcacggcgttgcacatgcccaccagcaggatgttcgcgaatatcaggtagagccacgggatggcaatgccgtcgcccacgggcaccaccgtggtgagcagccccaggtcgaacgtgtacacgaagggtatctccaccgtgggggccacccccagccagttcaccgccacgagcgtgaacacggtggcgatggcgaactggcccacgagcttcgccttcggcgtgaggccgagcgaacgctccttgaccaccttcgaggcatcgtccacgaggcccagaaggcccgtcagcacggtggcgcccaaaagcaggaacgtctcgggcgtgggcatgccgatgacgagcgccgtggctatcacggccacgagcatgatgacgccgcccatggtgggcgtgccctgcttcaccagatggctctcgggcccgtcggcgcgcacctgctggccgatatggctcgacttcaggaacttgatccatacgggcatgagcaccatcgtgaccacgatggcggccacgatggccaagaacacgaggaacgtcgggtagtgggagaatatcgcaaacatatcagttgaccagtccttcgaccacgcgctcgagccccatgaagtgggacgccttcaccagcacggcgtcgcccggctcgaggtacgtatccatctctccgagcacgtcggagaccgttgccgcgcgcacgatgcgcgccgcatccatgcccgccgcctcggcggcgtcggcgatgtgcgccgccagctcgcccacgcatacgaggcggtcgagcggcagcgttcccgccagctcgccgatgcccacatggcaggcgcgcgcgaagtcgccgagctcgcccatgtcgccgagcaccgccacgcggcggcccggcacctccagcgcgcagaacgtggtgagcgaggcgcgcatggagtcggggttcgcgttgtacgcgtcgttcaccacggtgaacccgccgcgcgcggcgagcacctcctggcgccccgcctcgggctcggcatgcgcgagggcctcggccacggcggcgagcggcatgccgaacgcacggcccacggccgcggcggcgcaggcgttgcccacgttgtgcagcccgcgcaggttgagcgagcaggaagcctgctcgccgtgcggggcggcggcgtccgagccgccgaagccgacggcgtgcagcacgaagcgcgggcggccctgctcgtccagctccacctgctcggcccacacggccgggcgcaccatgtccgccgcgtcggcggccacgcggcgggcggcggcgtccggcgacccgtcgaacagcacgcacggcacgcaccgggcgtccagccgcgcctcggcgcgcacgaagcccgcgaagtcgtcggccgcgttcacgaacgcgagccccgcgccctccggcagctcgcgcaaaagctcagccttggcgcgcgcaatgttctcgcggctgcccaagagctctatatggctctcgcccacgttcaccaccaggccccagtcggggcgcacgaacgagcacagctcggctatctggccggcgccgcgcatgcccatctccaccaccacggcctccgtctccggttcggccgagagcagcgtcttgggaacgcccagctcgttgttctggttgcccaccgtggccaccacgctatgcgcggccgccagcacgtcgcgcacgaggttcttcgtggtggtcttgcccgtcgagcccgtgagcgcgaccacgcgcccctgcaggtgggcgcgccactcgcgcgcaaggtcggtcacggcgcccgccgtgtcgggcacgtcgatgacggccgcgcccagctcgcgcgcgagcgcccgcacgtcctcggccaccggctgcatgaccagcgcgcccagcgcgcccgcggagagcgccgcggccacgaagtcgtgcccgtccgcgcgctcgcccggaagcgccacgtacaaatcgcccgggcgcacgtcgcgggaatcccaggtaatgcccgtgagcagcgcccgcgggtcgagcggctccacggcgaacgtcccgcccgtgtaggccgcgatctgcttcgcgttcaggcgcataggctactcagcgtccttctcgtccaacaggccgccgaacagccggtgcatctcctcggccgcaacggtgcggtcgtcgaaggacagcacctcgtcgcccaccagctggtagtcctcgtggcccttgcccgcgatgagcacggagtcgtcgggcccggcccattccagcgccagcgcgatggccgcgcggcggtcgggctccacggcgaagcgcccctcgcccgagcccatgccgcccacgatgtcgtcgatgatggccagcgggtcctcgtggcgcgggttgtcgctcgtcaccacggcgtagtcggccgcgagcgcggccttgcccatgatggagcgcttcgacgcgtcgcggtcgccgccgcagccgaacacgcagacggtgcgcccgcgcgtcagcgccatgatggacgaaagcgccttctccagcgcgtcgggggtgtgcgcgtagtccacgaacacggcgatgcctccgtcgcacggcgcgctcacgcgctccagacggccggggatctgcggtgcctcttccagcgcctccactatcacgtcggccgggatgcccagctgcagcccgatgccgaaggcgcacatgacgttctctacgttgaacttgcccaccaaggggtagcggaagcggtggcggctaccacgcacgtccagctccacctcggtgtgcgtgggggcgtagcgcacgtccacgggatggatctgcgccgcggcgtcgaagcccgtggtcacaatgctgtcctcgttcgtggcgcagcggcgcagaagctcgcggccccacttgtcgtcgatgcagatgacgcggcgggccgggtagtccttgccgaacaggcgcgccttggcctcgaagtaggcctcgaacgtgtggtggtagtccaggtggtcctgcgtgaggttcgagaacgcggtcacggcgaacgtcgtgccccacgtgcgctccaggtcgagcgcatgcgagctcacctccatggccaccacgccgcagcgctcgtcgcgcatgcgcgcgaaaagctgctgcaggtcgggcgactcgggcgtcgtgtgcgccgtcttctcctgctctccgccgatgcgcacgcccacggtgccgatgacgcccgtgcgcttgccggccacgtgcgcgatgtgctccacgaggtaggtggtggtggtcttgccgttcgttccggtgatgcccacgagcgcggagtccttcgatgggtggtcgaagaagttcgccgacgcggcggccatggccttgcgcgtgtcggccaccaccacctcggtcacgtcggtggcgtcggccaggtacaccttgcgctccaccacgagcaccttggcgccgcggtcgatggcgtcctgcgcgaaggaatggccgtccgccgtcaggcccacgatgcagaagaacgcgtcgcccggctgcacgcggtcgctgcggtaggcgatgccgcccacttcctcgtcggcgttgccgatgacggtgcagtcaattcctgcgaacaggtcggtgcaggttttccccatggcttgtcctcactcaggcattatctggaatcggtcgatggcagttgacattatatccttaaacaccggcgtgacgatggaaccgtattccgtctcgttggcacccacaaaacaaaccaattggggacccgtggagtcggctatgaagccggtgaatgccatgttgtacacgcccttgcggtagccgccgttcacctcgtcgtagatctccgcggtggacgtcttgcccgccacgttgtacccctcgatggcggcatctttgcccgtaccctcggtgaccacggtcttcagcatgtcggtcatgtcggcgaccgccttctcgctgccgataaccttctccgtgtcgtattcgggcgtctcgccggactggggcttgccgatgaggaagtggggcgtgcactccaccccgttgtttgccagcgccccgtagaagcgcgtcatctgcagcggcgtcaccgatacgccctggccgaagctgatgttgtaggcctgcaccttgccccacttgtcgaacggaaggagcgcccccaggtactcggtgccctcctcgccctcgccggggtagtccacgccggtgcgcgtgtgcaggttgtactcgtttatcttgttgtacaggttctcgaagcccgacacgccgttcgcggtagcgttctccgtggccagcgagatgcccacgttcgacgactggtccatgatctgctccagcgtgaaggtggcgtcgccgcggtcgtgcgcgtcggagatgatgtagccgtccgcctcgatctcgctcgggcagaacagctcgctctcgggcgtcatggtgcccgactccagaatggccatggccgagacggacttgaagatggagccgggctcgaacaggtgcgtgaccaccttgagctccgtcgcaccggccgggatgttctcgcgatcgttcgggtcgagcagcggaagcgacgcggcggcgtagatctcgcccgtctcggcgtccatgaccacggagctgccgccgttggaggtgagcccctccttgtcggccagcaggcggtcctccacgtactgctgcagctctatgtccacggatatgatgatgtcctggccgtccacggcgggcgtctcctcgtgcacgccgccggggatgggcgtgccgtcgcggccgcgctcggcctcgtagcggccgggctcgccggacaggatgtcgtcgtagtacttctccaaaccgctcaggccgttgccgtcgatgtcggtcaggccgacgatctgcgcgcccacccgcccgttgggataggtgcgcttcgtatcggcgatgaagtagatgcccttgaggtccagggcgcgcacctggtcggccacggcggtgtcggccttgcgctggatgaaggcgaacgtagaggtgccggcggacagcgcgttctggtagtcggccgcctcgccgcccagcacgccggccagcgccgcggccgtgcccggcaggtcctccacttcggaaggattggcgtagatggtggtggcatccacgctcacggccagcaccgtgccgttgcgatcgtagatggtgccgcgccgaggctcgatgtcgaaacccacggtgcgcgcctgctcggcctgcgaggcgtacgaaggagccacgatgacctgcaggtacaccaaccgcacgagaaagagggccgctatgacggcgaaggcgacaagggggatgaacgcgcggctcgaatcagctgcgaaaccgggagccgatgcgcgcggcgcgcccgggcggcgcggggcgcgcggggtgtggggccgtcccgccacgccgctactccgcggcgccggcggcgatctgcacgctcttggaaagcgacaggttcccggcctcgtcggtggcgacgacgtcggtgcccaggtcgatgacgccgacgctctcgggcgcggccatcttgaggcggctcgcctcggccttcacgcgcgtggggttggaaagcgagctctgctgcacttccaggttgttcccgctggcgcgggcgtcgcttatctggctttcgagctgctgcgactgcacggacgtggccacggtcgccgatccgatggcaatgcgggcaaagcacaagagcgccgccaccaccagcaccacggcgagcgtcttggccatgaacacgacggtggagggaatggtctgggtgcttgtgcgggtgccctggcccggcacgacgcgaacgcgcgggcgttcgggacgctcgggtacgcgctcggaataattgtaggaaaacgccggtgcggctcctgccatgaccaacctccttttcttcgtttctggctgcggtttcggtggtcgcggtgctgtttatgatgttgcttgcaaggcggccgggaccaaggccccggccggataggtcggtttcagcgttttcgggcgacgcgcagcttggcgctgcgtgcccggggattgcgctctatctcccctgccgtgggcagaagcggcttgcgcgtgaccaggtcgagtatcggctccttgccgcacacgcacaccggaaggtccggcgggcaggtgcagcggttcgcatacgcgttgaaggtttccttcacgatgcggtcttcgagcgaatggtagctgatgaccacgaggcgcccgcccggattgagccagcggacggcggcgtcgagacctcgacgcagcacgtccagctccgagttgacttctatccgaagcgcctggaacgtccgtttcgccggatgccccccggcgcggcgcgccgaggccggtatggcggccttgatgatgtccacgagctgctcgctcgtctctatcctcccattcgcccgcgaccgcacgatgaaatctgcgatacggctggcccatttctcgtccgagtaggcacggatgatccgagtgagatctgctgcgttgtaggtgttcacgatctctgctgcggttagggtggttttccccggatccatccgcatatcaagggggccgttctccttgaaggagaagccgcgggacggtgtgtctatctgcaccgacgagacgcccaggtcgaagaggaacgcatcgaccccaggtacctcggcgctgacgagaaggtcgtccatatccccgaagttgccgcgcaagagctccaagttggggcgttgctcgtcgggcagtgcctcgagccgggagcgggcggcggcgagcgccacctcatcctggtcgatgccgatgagcgtgccccccggacctacgagcttggccatttcaagggaatgccctgccccgccgagtgttgcgtccacgaacgtttgctgtggtttgaggttcgattgttcgaggcactcggcgagcagaacgggggtatgctggaattcatgttgccgatattcgcttgtcattgcgctcacgtcctacgatcagccgaacaggacaccgaggtcggtgtcgtcgtcctgcgcctcgtaacgcttcgcgtcccacacttcgaagtagcccgtgttgcccacgacgacgacgtccttgtcgatgtccgtcgcctcgcgcgcctccgtcgggagcatgatgcgcccggagccgtccacttccacgtccttcgcgcgggccttgagcttgcggcgcaggcgcacgtgcaggtcgttggaggagtcgtacttgccgaacttgtcctcgaacacctccgcgacccaggcgttgaagccacggggctcgaagacgtagaggcactcgtccttcggattgcgggttaccaccaagtcggtcgaaagcaccttgcggaatttcgcgggcagggacatacggcccttggcatcgaccttgaaacggaactcgccgttgaggtcgacgatatgcgccgccccctccgtgctctccgttgtgtcgacgacctccgccatgccatcctttccgcgtgcagccgttcggccctttcgatgtttggcattctatcccacttcgccccacttcgcaacatttatagggtattccgccccctttttgccgtgatgaaacccactgttcacccacccgtcattcattttccagcacgcggaaaatcggccataccacgggtaggcagagccgcggaatcgtccacaacatatggattcgctgcccgccgtggcacgaagtgggagaatttgtgacgccctcccaccccgccccacgcagaccccgcaggatcaaccgctcgttcaagcgctccggccatcgggccgggaatcggggccgggtcggaaacggaggcggatgggcaccggggcggcgcccgcgctcccagcgcgggcgtaccgggcctaagcggggacgggaacgggggcgggggtcccgcaaggaggcgggagcaggtcgggggtcggggggggcgtcacccagcaactccagtcaagcccggcagcagcgcgaagggagcaagcgaaagatcgaattagcgaacggatgtttcacgtgaaacatccgtttcgtagcgagccctatttccgcacaagcacaccatccctttccgaagaagctgcgagcccgtcccgcgtgcgcctccaaacagcacccaagaagctccgcacgctcccagcgcgggcgtacccgggcctcggcgatcagcggagtctaatattaccaattcggtcatgtacaagatcggagcctgtggtaggtttttgcgaccgcgcgtaagcaattcccgtaaaaggcctgttcgcaacaagcatctggcgattcagacaccagcaatcgtgccatagactcgaatctcgtccacgcggatttgcgccaggcgcgcgacagactgccccaccgaatacgcatcgctgcacgacgcacgcagcaggccgctgcccgagcgcagatgattgcggtcgcatacgcaacaagtcgccgcgccaggcgcgggcgaccgcactgcgcacgcaacgggctcctgcaccgaacgcgggagcatgcgtcgcgcatgcgacggggatgctgcaccaagcgcacgagccagagcgttatccacgcgaagcgccatgtgcatgacgagcaggtgcgctatgctcgcgggcattgcgcgcgcgggtgggcgctcaggtactcctcgcggatgtgggcgcggctcacgtgagtgtatacctgggtggtggagatgtcggagtggccgaggatctcctggataacgcgcaggtccgcaccgccttccagcaggtgggtggcgaaggagtggcggagcgtatgaggatgcaggttcgccacgcccacgaggcgtccggcatcggcgacgatggtatgcacgctctggcgcgtcaggcggccgccgcgggcgttcaggaacaccgccgccgtgggcttggcgtagggcctcgcaagcgcggggcgggcatgctccaggtacgcgcccagcgcctcgagcgcagcgcccgagatggggctgatgcgctccttgccccctttgcccacgacgcgcaggtacccttcctccaggatgcaatcgcccagatcgagccccgtgcactcgctcacgcgcaacccgcagccgtacagcacctccaggatggcgcggttgcgcatctccgacggactgtcgcccgtgcaggcagccagcatggttgacacctgattcaccgacagcacgtcgggcagccgctcggggggcttgggcagctgcagggtgtcggtggggttgcggcgcgcatagccctcgcgcacgaggaagcggtggaatcccttgatcaccgaaacgcgccgatccacgctcgacgtggcgtagccgcggtccacgaggtcggcctcgtaggccaccacgcaggcgcggtccacgtcatcggcattgtccactccgcgcccgtcgaggaaggcggcgtaatcgcgcaggtcggtggcgtacgccgacacggtgagcggcgaggacccccgctccacgcgcaagtgcgagaggtactcttccatgagcgtgcgcacggcgtccacatccgcccccctttccagcggccctcgggatcgcctacgagtatagcaccggcctaccggtccttaagggggctttcggcgcactgcccaacatgggagacgctgcactccccgccgcaccgccctgcccgcggcgagtttttacacgctagcaacaccgggtacggcaagtgcgatatactttggttcgcgcgcgtacgcgcatcaccgtcttctcacgaaaggggcgccgcagacccatgcgcataggattcgacaacgaccagtatatcgcgctgcaggcagagcacatccgcaaccgcatcgaccagttcggcggcaaactctatctggagttcggcggcaagctcttcgacgactaccatgcctcgcgcgtgctgcccggcttcgaacccgactccaagatccgcatgctgaagagcctcatcgacgacgccgagatcatcatcgccatcaacgcgaacgacatcgagaagagcaaggtgcgcggcgacctgggcatcacctacgacgaggacgtgctgcgcctcatggacatcttccgcggcatgggcttcgccaccagcggcgtggtcatcacccattacacgaaccagccctcggccgaggcgttccgcaagcgcctggacagcctgggcatccgcagctacctgcactaccccatccccggctacccctacgacatcgaccgcatcgtgagcgacgaaggctatgggcgcaacgagttcatcgagaccacgcggccgctcgtggtggtgacggcccccggccccggcagcggcaagatggccacgtgcctctcgcagctctaccacgagcacaagcgcggggtggcggccggctacgcgaagtacgagacgttccccatctggaacctgccgctcaagcacccggtgaacatagcctacgaggcggccaccgtcgacctgaacgacgcgaacaccatcgacccgttccatttggaagcgtacggcgagaccacggtgaactacaaccgcgacgtggagatattccccgtgctgaaggccatgatggagcgcatttccggcgagagcccgtaccagtcgcccaccgacatgggcgtgaacatggcgggcaacgccatcgtggacgacgaggccgtgcgcgaggccgcgaagatggagatcgtgcgccgctacttccagaccgccgtggagacgcgccgcagcggcacgggccaggagcacgtggagaagctggagctgctgatgaaccaggccggcgtgaacgcgagcttctcgccggcccgctcggccgcgctgctgaaggaggagacaaccggcggcccggtgggcgccatggtgctgccggacggctcggtggtcacgggaaagacgtcgtcgcttctgggcgcggcgtcgtcgctcatgatgaacgcgctcaagggcgtctccggcgtcgacgacgagatcgacgtcatcagcgacgaggtcatcgagcccatctgccgcctgaagaccgactgcctgcacagccgcaacccgcgcctgcactccgacgagacgctcatcgcgctgtccatcagctccgccaccgacccgcttgccgccaagctcatcgagcacatcgacgacctgcgcggctgcgacgcgtacttctcggtcatcatctcctccaccgacgagaagctctaccgtaccctcggcatcaacgtctgctgcgagcccaagtacgagcagcaccggtactatcacaagtaaaacggcgcgcgcaacgaacgctatcgaacgcccccctcacctcagaattccaaggcgaggggggcgttctcacgagggctctcaaaacaccggcaaaaccttgcacggatctttccaaaaccttgcaggaatccagtgcattttcgttcaattttctgctttttaccaggctaaatagcctctatccaagtgcgcgttcaaggcgtagaatgagtgtgccggcggtgtccgcgctcgggtggcgcttctttcgagaggagtgttcgcctatgaacgcagttctagaaattcttaacgcctacgcagcgatagccacgctcgcgagtttcttcctcgccttgtggacgaaccataagaacgcggacgaagcagggagggaaccaggagatggtaaaggccgggattaacccggcctcccactagtacccgcgccgcccaacctggatggtgaagcccgttaaactcgccgtcctgggcaccgccggtaatttgcattatagcgactcgatgccatcaaatgcaagaaggccggcctcgcatattagaggcgacacgttcgccgcaaccactggaatgaaaagattgctccaagggaagcaagccgatcaggcggctgagactatccagatcatggagccgtaggtgaagccggagtcgccggaggcgatgacggcgtcgagcagggtgcgcatgccgtagtcggtgaaggtgccgtgccagacaagctgggtgcccatgtcgccggcggcgaggatgacggggcggtcgaacgtcacctccaggccgagcggtgtgaagcgggcgtcctgcacgaacgtcgtggcgccgctctcggtggaaagcgaccacgaaccgcccggcaggtccatgtcggagcgcttgaggcgcgcacccgtgatggccacggcgcgctcggagcggttcgccaccatgacagggatggtggcgctgttgaggtcgtcctcgcccagcatcatggaaaccgacgaggggatggtgatgttgacctgggcggcctcttcctcgggagcgttcggcacgactggctcggcttcgggctcggacgtttcctccgtcgggacgggcggctcgtcgctttcgggcagcggtgcctccacagcatcctcggcgggatcgtccgcaggctcgtcggaggagtcgtcggcgggcgcctcggggtcggccggctcctcgaccgcaggcggctcggacgcgtcggggttcacgagcgagcggccgtcgaggtcccacgcataggcgagcacgttctcatccgcgccgcggtagacggtggacagcggctcgtcgggcggctcggcgaagccaaagcactcctcgaggatcgcatcgtcagcgaacgcgagatcgtccggcagctccacgagcttcgggcagtcgaagaacgcgcgcgtgaggtccttgacgtcggcggggacgttcgcgacctcctcgaggttcgcgcacccctcgaaccagtgcgccaggctggaaggctccaccgcatcggcgaacacaacgcgcttgatgtcgtctgccacgccatccgcaagccatggcacctcgtcggcgctctcgaacgcaagggtgtcccccgccccgtccacgacgaacgtcccgtcgtcccacaactcggctacgaccgccgcagcctcgtcgagcccgataggccaggcgttctcgtactcgggaacggaaggagttgcgggagattcaactggagcggtcggtggcgagggttcggttgagggcgttgtgacgatcacgttgttcacatcgtcgacgggagaagtcgtagcgtccgaagagccgacaggtttcgccgactcaaatgcggcttctggagcagcttcgaaggggctggatgcttcgctggctgcttccgaggcagcaaacgaataggaaaatggccatagcaacccgagcaccaacagcaagcagagcgcaaaagccgcacccaaaaggggtacggctttcagtgatgcaatgctatgtaatgccggcttcgtcatgaagcgaacgcaatgcctttctatgcagcagttatggtccaggtcaagttaaccaaatcgagagctgtcacagtgcttgcacccgtgacgttggaaattgaaccattaaggccaatagccacatcagaacctttgaccaagggagtagttagatcctttgcagcatcgacagcgctctccaaaccaaactctgattcactcccgaccgtcaacttcatagcgaccgtgttcgcaacgttcccggtagtatcagccgctaaagtgacgttgcccagcgccgtcgcttttactcccgtaatcttcatcgcagtgatagagtcggtgctgatgactacactgttaggaaactggatttcgccgttcgtcttaatataagccggcacgacggtcggaatagtggcactaacctgagagctgacggtggcactcaccttagtagtgttggagccgtcaccatacgctccggtagtcgcgttcagttccgcatccgtcgcaaacgccgtccctgcgcacaaacccgtcagcattgtggcggcgcatacgcctaccagaccccgcttgatgtagttgaaccggctcgtcttcgtcatgatactttccctttcctgatgtgcccttacgttgtctgacatgctctgactatctctcgtcgaaggttgtcttagccttcgacgcgtaacgtgatctcggcggccgcttggccggtcttcttatgcgtctcgcggtcataacctgtgaacgtggccacggcggcgtactctccgggctccaggtcgcgcgacagcttgatgttctggatgtgctggtcgggagcgatggctccggactcgtaaaccgtctcttcggagtccttgagcgtgatggccaccttctggtccatcgggttcgcggcgatgttctcgatacgcgcctcgccctcggacgcgccgtcggggaacgtgatgacggcggcgatggagatgttcatcatgcccttcgccacctcctcgttcagagcggcttggatctcttccttggacttgccctcgaactggccctgggcggcgttcgagtcgaaccagtcctccacagccggctgttgcgtcagcacgacgcccgcggtcacggcagcagctacggccaccacggccaccaggccggcgaagacgtgcttggacatcccgagaatcttcccggttttcttggccgtctcgacggcagcgttcgttgcagttgaatgagagtcagaagccccggtttgggaggcctgttcggcagatgtcgaatcaggaacggcacccgaaccctgcttgcccgcggcactatcggcggtgtttccgccatccgcctggtgcgaggaagcattcagttcggtgtcgtctactggaaggctctgcgtgctctggctgtcttgcttgctcatacgtataaccccttggtccggttcgcatgctgaggcatggaacttagtaagctaagatacgacagggggggggtggcgaagtcaaccgagaccggatacaacgattattctattttcggcatataggcaggtaaaatcccagtagaacacgcatatttatcaacacgcatgcacctagaagaacacccgcgccgcatgctcgtagaagccttcccgctggtagcgcagcagtaccgtgggagtgtcgccgcggcggacgtagacgcggcgcacggggcgctcgaactccagcagctcgccgtcgacgaacagcgcggcctcgcgggtgtcggcgttgtgcgacaggtccatctccaccacgtcgttggacgctgtgacgatggcgcgcgagtgcagcgtatggggcgcgagcggcacggccacgagacccgcgaagcccggcgacacgagcggcccgccggccgagagcgcgtaggccgtggagcccgttgccgtggccaccaccaggccgtcaccgcgcatgtcggcgatgtgcgcgcccgagatgctcaagccgaagtcgatgatgcggccgtgcgcgccgcgcgtcaccgccagctcgttgagcgcgaagaacgtgcgcgcatcgcttccgcaggggaacccggatgcggagggcgcctcgtcgggccttcccccttcgtcgggaccgtctgacatgaggtcaccgtcgtcgccccagcggtcccgctcgccctcgcacaccacgtcgatgcgcaggttcgtgcgctgttcggccaccacgtcgccggcgagcgcggcggccaccacggccaccaccccctcgtcgctcgtgttcgccaagaagcccaggcggccgaagttcacccccaggatgggcacgcccgacgtgccgatctggcgcgccgtgcgcaggatggtgccgtcgccgcccagcaccacggccatctccaccccgtcggcaagcgccgcgttcagcccttcgtggtcgccgcggcacgacaggtccgacgagtccacgagcgtgtaatccgctccctgcgtggccaggtacgtggccagcaagagcgaggcgtccacggccttcgagttggaattattgcgtacgatgaggatgcgcatgagggtcttctttccgggtttgctatgatgggccattatatccgatgcgcaagaaagcgtccgtccatgtccgacaagctcgcacgagctcaacatacgcgcgttgccgagccgacaccagcccccacgcccgcttctccgaccgcccccgccaagcgcgccgcgacgccgtcgcatgcgcgcgcggccgatccgggctcgacgtcggagatacgcgtgggcgggcggcatgcgggtctcgaccgcacggccatcgcggccgccgtggcgcagcaggtcgttccgcgcccggagccccggctcgaccctgccagcgcgaaggcccgcctgcgcggcgcggcgcccggcgagacgtcggagatacgcatcggcggaaaccatgccggtcccgaccgcacggcgccggcacgcgaccccttcgagccccagacgcccgacccgcgcgcagcggcgcgggctgcggccgtggcgagccgccgcgccgaacgggcggccttccccggatcgacctccgagctgcctatcgtcagcaagcacgccggcgtggacaagacggcgctcgcgcgcacggacgatgccgcgcagggcgacgcggccgccgttgggtcgtcggccgcgctcatcagcgtgtgcaccatggtctcgcgcgtgctgggcttcgtgcgcacctggaccatggccttcgcgctgggctcaacgctgctctccagctcctaccaggtggcaaataaccttccctcccagctctacgagctggtgataggcggcatcctggtgacggcgtttttaccggtgtacatgtcggtgaagaagaggctcgggcagcaggcgggcaacgagtacgcctccaccctgctcaccatcgtggtggtgctgctgggcgcggtgtcggcgctctgcatcgcgttcccgtcgttcttcatctacacgcagagcttctactccgaccagcgcgagatggcgcaatcggtgttcttcttccagttcttcgccatccagatcgtgttctccggggccacggccatcatatcgggcctgctcaacgctaaccgcgattacctgtggtcggccatcgcgccggcggcgcagagcatcgtggtcatcgtgtcgttcctgacgtacgcggcgctcgcgccgggcaaccccgacgcggcgctctacgtcatagccatcggcaacccgctgggcgtgttcgtggcgctggccatccagctgccggcactgcgccgcaacggcatcaggctgcgcccgcgcatgaacctgcgcgacccggctctgcgcgagacgctctcgctgggcgtgccggccctgttcgtcatggtatgctcgttcgcggtggtgtcggtgcagaacgcggcggcgtacagcttcgccgacaacgggccttccatcctgctgtacgcgcgccaatggttcacgctcccctactcgttcttggccgtgcccattaccacggccatgttcaccgagctggccgacatgcaggcagagggcaacgccaagggcgtgaagcgcggcatcgtgagcggcacgaaccagatactgttcttcatgatccccttcgcgctgtacctcatggtgttctcgctgccgctcatcaccgtgttccgcgccggcgcgttcacggcggagaacgtggcgtccatcgcctcgtacatgagcgtgctggcgttcgcgctgccggtgtacggcgtgaacacgtacctgcagaagatattctcgagcctgcgcaagatgggcgtgttcgcggcgttcaacttcgtggcgggcgccgcccaggtggcgctcacgatgttcggcgcgtcgcacgcggagagcttccccatcgagatcatcgccgtgggcgaggtgctgttctacgtggtggccgacgtgtgcctgttcgcgtacctgcgccgccgcctggggccgttcgggctgcgctccacggcgaaagcgtttctcgtggcactggtgttcggggggctgggcgcggcggcgggcggcggcgtgctgttcgcgctcacggcgttcgtcgggccgctgtccgggtccatcccgcaggcgctcgcctatgtggcgtgcggcggcctagtgtcgctggcggtgacgttcggcctggccatcaagctgcacgtgccggaagcgacgttcgttggcaacatcgtgggcaaggtggccggcaagctggggcgcggccgggcgtagcgcgtctcggtacgcggcctacccgcggcgtttgcctgccgccgcagccacgaccgccgtcgcggctgcggcggagccggcggctgcgattgccccgagcccccaaccggccgcatcgcccgttgcggcgagcttcttgggggccgggtagtacctcgacgcaggcaccgacgtcgacgccggtgcagcagagggcgcgcccgacccgcccgtcggcggagccgagcccggctcgggctgcggcgcgggatcgggtagcttctcgaaccgggccgttacggtcaggttctgcacgatatgcgagaaatcgacatcccatcctgtgaagcgatagccttcgggggcttccacatcgggcgcggttgctgcgctgaacagcagcacctcctcggtggcgagcacttggccctcccagcctgcgaacgtcaccgtacgcgtggcggtgatgaggaacgagccgtcgtcctggagcgtgcccacgcgttcgccgtcctccacgatggcggtgtcgccgccgttcacgaacaggtggtcgagcgtcatgagctcggaaaggcgcgtcgccccgaacggcgccacgatggtgttcgacgtgtaatcgccgcccaccgagtagcccagcacccgcacgggggcgccgaacacgatatgcgagagatcgagggtgccgccgaaatgcgtgatgttgctgaggctggctcccggcccgagcacgagcgtggcaccggcccagatggacatgccataagcgccgcccgtgagcgtgacagtggccgagggcagcagatccaggggaagcgtggcctcggcgatcgtgacggagccggggccgctcacgttggcaggccgcgtcaggtcgaacgcctgcacctcgttgccggcaccgtccaagcgaagcgccgtgaccccggcgaacgagagcttgccgatgcgcacgcccgagcccacgttgatcgcgcccacgcccgcggcgacccgcacgtcgcccatcgccgccgaggtcgggtccgccatgccggcgatggtcacgccgtcgcccgtgacggagagcaccgcgccatcccacgcgtaggcatcggcgggcccctccacatcgaacggccctgccggagcggcgtcggcctggccaggggcaagcgcaaagagcaccgcggcaagggcgcagacgacgatcgcaagcgtgagcgcatgacggcgcggctgcggctccggcgcgcggaatcggggcgggacgacggtttcggcgggcatggggtcactcctatcgcatcggttgatgcgacgagcctatcacctgcgcccggcatcgccccacccatccgccagcctgcactcaacggtagcaaggccgttgacctggcgaacgcacaacgagaacccgatgctcccgcttactttcggaagggagcctcgggggattcaggcgtggcggaagcgccaggggcaccaggcgtcccgggagctttgggggctccgggagcaccaggggctcccggggcaccaggggctcccggggcaccaggggcactaggagccccgggagcgcttgagctgcctgcgccttcgggattgttgactaccggggtcgacggtctgaagcacatgggaaaacctccttttgaaatgaaagcagcctgtcctcgccgctttccctgttcgctattgtaggggcggatgccatgcagaacatgaccctgcctgcgtggtttaccccaccctatcgcacggtgagaagaggggcggttcaaggggtggcacgatgctgaccgggagcgataacgggcaccatacgaggagaaagcgctcctctcacgagctcttcctccatatgcacggcgttggcggggcagatgcgcaggcacgccccgcacccgccgcacaccaaggcgtcgtccacataggcacggcgcgcgtccgcatcgtagccgatcaccttgcccaaagggcagcagcgcatgcagagcttgcagcccacgcacaggccagcatctatcgtgatgcgctttcgcgaagtgaaatgggttctgagaggtccgtaagccatgcatccatccagtcctacggcaagccgcacgccgcaaacgcggtgtctagccgtcttccaacgcgcacgccgcctgcgcctcgcgttccttgtcgcgcttcgagttgatgaagtacagcacgatatcggttcccacgaagcaaaggttgatcacgtagaacaccaccacatagctcaaggacgtagccatgaacttcgaggtgattccgcacaggtaggcgcaaaacgatatgctcaagaacagtaggctcttgcctttcgccgttttcgagcggatcgatttcacgatggaggaaggccaggcgataccgaagcccaccagaaacagcatctcgaagaattgcgaccaaaacgtcatgggacgtctcctcccccgccgcggtgcgtccgcgctcaccgtgccgccacgcgctgtctttcaacgctccgtcgagggggcgccagcaccagctgccgccccctcggttccactcgttacgggagcgaaccacctctcccgtcccgacagcctgctacttgccgagcgtgtcgtacgtgcacttgggatgctggcccggatcgtcgttctcccagtcgatccgcttgatctcacggcagcccagcttgtcgtactggtcgttgaaataggtgtcgccctcgatgaactggtcgcccgtcaccgtcacgtccgtgcggtcggcaggatcgatgcacgggtagatgcggcagagcaggccgcggttcgtccacgttcccgtggcctcgtcggaacccctgaccgtgccatccaccaaacagccgacgttggagatgaacgcaccctggctccacggctcctccgccggaagctccggataccaccacgagggcatggcctgcacagtgcccttgatgatggcctggtcgacatgggcaacctgcttgatgcggccgcgctcgttctcgatccacacccagtcgccgtcgcgcacaccgcaggcacgggcatcctcgcggtgcatgtatacgctgggatacgggaagatggagcgcgtaccctggccgggaacgcggttctcggagtggtacaggaccgagacgcggccgccggtggtcaggcgcagcgggtacttcttggcaagctcgggattcgaaagcggcgtctcgggcagctcgcggtagtacgggagcgcgctgtagtccagatcttccatgagcgtggggtagatctcggccttgcgggtgggcgtcgcgaagcccttggtctggccgttcggcagcgtctcggcgtacttgaaggagcgggtgggaccggggaaccaggtaccctgctcgcacagcgtggtgtaatccacatcgaccccgcgcgagatacggtgcttgatgacatcttcgtaggtctcccacggccaagcctcggcctgacccatgcggatgcccaggccacggaagaagtcgtagtccataacgcggtcacccaccggcttggagccacggtcgccgcacaccacgaagtcgttggaatcctcggcggtggtgaagcacgggcgctcgagggagtcgcagccggggatgatgtagtcggccatagctgcggcaggggtcttccagtactcgacggagacgataagctccaggttgttcttcatgatcttgtacaggcgctgcggatcgggcgcccaggcgaacgggttggacgaccacatgatcatggccttgatgggatagggatccccgaactccatggcatcgtataccagcaccggcgagcacaacagctgatgcagcatcgggcgcggaacgccgaacatcttcatgtaggcgtcgtaaatcggctcgtagcccttccagctcatagcgcggaactggtcgtagccgatgtacttcttgcgaatctcgggcgtgacgagctcggacatctccatctcggcatcgcggtacgggaacggcttggagccgtcggcctgcacgacaccgggctcgcccacgtactcgccgcccggcttgtcgatgtagttgcagatgatacgcagaatggtcttggtgatgcacaggcgcgaggcgttcgggccggcctggtcgccgcctccgaggccccaggtgatgaacgcgttgccgttggtggcgtacacgcgggcggaatcggcgatcttgttctcggggatgccggtgatgggagatgcccactgcgggctgtagggctcggccatctccttgatggcatcccaagcggtgtagcactcgaccgtggagccgtcgagcagcgagatggtatgggtaccgctcagagccgggtcgacgtcgccgtcggcgaaccactcgttcttgtcggagttccacagcaagatgttgctggcaaggttgtcccacaccacgaagtcggagtgcgcggcgccttctttaacctggtcggcgcgaatggtgtgcttggtcttcttgtccagcaggaacgggccgttcgaccaccacttgatgaactcctcgtcgtaccagccgttctcgatgacctcgtgcagccaagccagggcaagcgcatggtcggtgccggggtagatgggcatccagatgtcggcaagcagggcctgcgtggtgcagtacgggtcgatgacgatcatcttcggcttcttgccggggcggtccatcgcagccaggtactggcgccacatggggctttgcgggccgtatttctcggaagccgaaaggccccacaccacgaacgtatcggaccggtcgatgcccaccggcgagatggcctcgataggccagcccaccatggccatgttcagcgtgtagttccagcaccagcagatggtgccgggatcgatgacgttgcccgggttgccgaggttgttgaagaagcgggtgcgcgcccacaggtggtcggagcggtacgtgccctcggaagagaccaacgtctcggggccgtacttgtcgataagcgcctgcagcttgtcggcgatctcgtccatcgcctgctcgtaggggatctcctcccatttgtcctcgccgcgctcgccggcacgcttcagaacatggttgatgcgcttgggatggtagtgcatctggatggccttctggccgcgctcgcccatgcggtcgcacagcaccgtaccctctttccaattgccgcgaatctccaccacgcggtcggtcttggtgtcggcgccgatgacgatgccgcagttcatgtggcagtagaagcagcgggaatacgtccattggacaccggtctcgtcgatgtacttgttcggcatgtcggcaggaagcttgacctcgacccgttcggtcttcttaagttccattgaagcccctctcgaatagtctgtgcggggcattctcccagccccgcgaaagtcacatgcgagcaagcccgggttccgctcgcatgccgttgagaccattctattgagggagggagcggagggcatgacgcgcccaaggtggtttccccagcctattccggggagggagcctaggatgagaggcagggtgaggcagagacgtgcccccgcccccgccgatgccggctggggcgggggcggggcgcgattattcgtcctcgccgtcgtggacgatagagaaggcgtcgatgcggttggtgacgcccagcttgctgtagataccgcccacgtggcttttcaccgtgttcagcgacacggtgagcatctccgcaatctcgcgccgggaaaggcccgcgtcaaggagctccagcacttcgcactcgcgctcggtcaagccgaagcgggccataggattcgccgtacgctccagcaccgtctcctcggcttcgttggccccgaagcgatgcagcaccgccttcgcaagctgacgggcctgtccgccggatttgcgcacgtccacgatctcgtggagcagcgcgcggattttcccgccggcacgcaagaaggggcctaccacctgctggccggcttgcagcctgagcgcgcggttgagatacatgagcgcatcggagcgccttccgcatgccgccaaacgctcggccgcccgaagggaaagctcaagctcgcgcaagccgagccccgcttcgcacgcgcgctcgacgagcggcaagatgtcgtcggggtcgccgacgcttcccgaagcatcgtccacggcagcgcgcacggccaagccggccagctcgaagtcgatatcaccccggccgatgcccgcctcgaggcgcctcgccgccgcatccgcctcggggatataccccatagccaacgcaacctgggcttgcctgacatgcacgagcaggttgatgctgcgcggcacgcttgccgtgcccatctgcagtgccgtcttcgttatcaggttgaaagcctgggcgtgcttccccgccgccgcgtagtaatgggcgcgctcggcctcggcctcgtagagcatatccacgttgcgagacgtggacacgatacggtgggcgcgctcgacgcactcgcgcgcctcttccaaccggtccatctccacgcagaggtatcccttggaggcaagcagcgatccgtacgggataacggtatcgggacattcggcaagcgccttctcgcacagctcgagggcttccttcaactctccttgcgcaacgcgcaaggagataatgcccatgcggcacatggcaaggtagaagtccgatttacccagctcggccatgacctccgcctgcagatagttcttcagtgcctcgtcgaagcggcctctgcgtgcatacgattccgccagcgagtgcagcagcaggcaacgctgcggaagggagagctcttcctcgtgggagcgcaggatagcctcgcttttggccatggcttcatcgtgaaggcagtccatctcaaggcattttgcccggaacaggtcaaccacgatcgaggcatcgggtccgtcctgaccaggctcgtgggctgcggcgcgctcgaacacctcgatccagcgcaagccctcgtccgttcgggcgcagataacgtacccccatgccgcatggagcgccaactggggagactcggtgaaccgagctgccgtgatgcggctgatccaatcgaagtaggacatgccggtgcgctgcgattcatatcccgaggcctgggccaggttctcgatgaagttggaatctgacgccatcagcaggtacttcgccgcctcggaggtcatctggtgcgcctcgtaccagtcgcttgccgtccggcagagctcaagcagatggttggcgtccatttgcccctgcttcatgcgcagccaccggcgaaacagcggatggaactcgaaccagcccgcctcgttggcgcacgggctgagaaagcacccccgtatgcgcaaatcgcgcaggacgaacttggagtcggtgcgcccggtcagcgcattgcacaagtcggcgcacaccgtatcggtcagcgctacctctatcacgaactgcgccagatcttcgggcagcgcatccaacacgctgctgcggaagaaacggttgagcatctggccgagcgcgcgctcgtccaccgttgcagaacagtcgatcgacccgcggacaagcgcatcggcatacgtgcgaacaccgagcgaccagccgttcgttataccccacagatcagccgcaagcgcctttaaatcccgcgcatccagcttgatgggtgtttcggaaacgtaggagacccgaggcgatgtctgagcgtccatggcctgtctcaagatggcctccacctcgtcttggctgaaattgagcttatccgaggggaacatgcgcacctcgtcacgaaaagccaaatcgatgtgctcccacaacaggtagtttcccgaggctaccacgtgcaccgtttcggggaaatagcgcgccgccgaattgaggaattccgctatggcgtcgggggccgccctatgtaggtcgtcgacgagcaaaaccacatccacccccacatcggaggcgcgttcaagcaggaagttgctgagcgcaacccaaaaataagtagggttttcctggtaaagccgaaccagctcgaccatatcgagctcggaccataccgtatgcagggcggcaagcacatggcgcgccaacctatcgcagtcgtcggcatcatccaccgacaaccaggctgttcgccaatgctcggcatcatcgccaaggcgccggtacgcttccgccagaaagccgcttcttgccgaccccaccggagcctcaaccgtcacgatcttgccgctcaagcactcgatcaggctttgcagcgcaccgtcccggtcgatggagagagacgagcggcgaggtggagtgatcttcgccaaagcaacgtcatgcgaaaccttcataggtatgcctgccgccatggtccttcccccttgccaacccgtgcgctgccggtatccaccctgccattatgctacttttcctaccgccggagccgaccctgccggcatttgcagagaagcatcttcaatcaacgtggagcacgccaccagatcctcgcttgccttgaggcgcaaggcaccctcgcgcgccaggtaaagatagccgccgctttcaacctcttcgcgcatctgggcgccccggccctgcgccgaagaggcgaagaacgcatcgacgtcggcgtcggttatctcaaggccgcgatacctggcccacgcgtcgagcgcagccccctggcgcagctgggcgcgtgcctgcataagcaccatcatgcggtactcctcctcgctcgagccttgcgcgctcagaagctcgtcgaccgtcgtatgctgggcgcgggcctgctcgtacagcgaatccatcatctggtcggccacggcatcgtaggccgcatcgggaaggtagccctcgatgcgcttggcaagctcgcgcgccgcgaggaagttgcggtaatggcgcatctgctccgccttttgccgctcaagctccttgcgggacagctcccgcagttcaaccacgctgctggcgccgggaatgctctgggagatgaagtcgtcgttcagcacgcaggccacctcgcgcatgatagcctccactttcacctccgcgcacacagaaggacccgaaagcgtcccatcgagctcctcgcgcgtcggcagcaggaaatcgacgtgcaccatgctgcccacgggtgcatgggcaagcgcctcgtcgaagccatccggcatctgccccgagcccgctcggtacaagcggttggcgaagcacagctgctcgaagcgctctccgtccttcaggcagtccatcgatatctgcaccacatcgccctcggcaacctgggtgcggctctcatcgggttcgacgccggtgtaggtctgcgccacttcctccatccgcgcatcgatttcggcctcgctcaccgaaacgggcggaaccgccagctcaaggggttcgtaggaggaaagcgtcacggcgccgaggcgcgtccacgttgcatcgaagactaaatccccttcggcttccaatctgcgatcggcatcgaagattggcgcgcccaccaccgagtagtcttcgctttccgatgacagggcaaacggtgcgacgaagttcttcatggtttgcgtcaccagcgacgccgcctcggatacgccaagcgcgctctcgagcagctggcgtgccgtctcgttgccgcccagatcgatgttgtttcgctgggccaccaccaagcaggcgccgcgctcgagcgactccagctcgcttgcagccacgcgcaccgtcagcgttaccgactcgtcctcaacacgcctgccctcaacccggatctccatgctttcatcctccttgtgcgtcatcatgccaacaccgcaaaccatccccgcagtgcgctttcgacgatagtgaacccctctcacccctccgtacagctactacccgggtggtttgacagggtgagagacagggcgagatcgaatgcccgcaaccatccttcttttcttcagagtccaagaaggaaacgtatcgcctgatcacgttcatttcgccccgtgtttcaccctatcatttcaccctttcgagcgcatgaagtcgccccgggtgggcgctagggtgaaagcacgagccataccgaccaggaaacgagggggatcatgcggtttgaaaacctcgccaaacactatattcccgccctgcagtcatacgggattaccatcccccaagacggagaagggcgcttcatgcttttcgaggaagacgggaccatcgtgcccgaagtgcgcaagcagataattccgttgggcgaagagggcttgattccccaaaagctcatgcaggacgcggttttgcagtacctcgactaccagcagcaagaagacgacatcctggcaacctacgcgctcgcggagcttcacgaacgccagctcgatgcgcatctggctttgtggcagacgatggtcgatgccgccaaggccggccgcgccttcaccgatgtcgagctggcctgctacgagaaggatatctcccgtgcgcgcaaaaacctgaaagccgcgcgcagcaacgcgcgggccgacatagccgagcgcgcccaagcgctgcacgaccgcgagaccatacggcgctacggcctgctgttcgaccgcgagatgatacaggacatcgatacgctggtcggcaacgccctctcggcgcgccccaccctcctcgtcggcgacaaaggcatagcgaaaacccaaatggcgaagttcgtcatgcgcctctacggcaccgagccgctcatcgtctcggtcaagggcgacatgatgagcgacgagctggtagggaagatggttcacgatgccccccgcaatacgttcgtgttcgaggaaggagcccttccccgcgccatgcgcgccggcgttccactgctgctcgacgaaatcaacttcggcgatcaggcgatcatcgcgcgtttgcaggacatccttctcaagggccccggcgaatcggtgtttttgcaggaagagggcatcgacctggtagtacagcccggattcaccgtgttcgccaccgccaacgaagcatcggcgcgatatcggcaccgcgaggtcctagaccccgccatccgcgaccgctttgaggtcatcgagcgaacctatcccgaccttgatcgggatcccctgcgccgtcccagcccctccctgatgcggctcgccctctgcgaggcggtcgatgccgacggggttttcagccgccatctcgaccgcgacctgctgaacgccttggtgcatcttgccaccttgaccgagcacctctatgccgtgccggcgaaagacgcggccatctcgcttgagaaagaccaagctggcagcatcgtgcgcgaagacaccgcccctttgctgaccgactgcatcacgccgcgcgccctcaatcgcgccgtccaggacagcgcaggaggaaacctgcccggacgccaccttgacctctacctcatcgacaagctgctgcgcacccttgaccaagcaggatcgaaccataacgccagcctagcgcggcaagccgccctgctggtgggcatcgacctaagcccggttggctgaacccatggccacccgtgttgaacaggtgaagcgcacggtcgagcacgttgcggcaatcagcgggctccgcaccgccacggtttgcgtgagcgccgagggcaaaaccggatgccggcttacccgcagcggcatcgacctgctggtaaaccacgagctcaacgaggacattgccgcgcgtaagcgttatggcgtgcgcggcaccatcgcccttggcgaagtcgacaccatggttgcctgcttcgtggcaacccgtgcgcaggatttcctgctcgacgactggcgccagcgcttcgactaccaaaacaacctgtcgtcccccgcgcaacgctacctgcagacgtgcatcgacgatatggcagcgtatgcgcgcatgatcagccgcattccctttgccaagctgcacttcgaagcctacctctcgcgcgcggcggcccatgtgatggcgagcgagcctctacacatccagcttatgcgcaccctgcgcctctaccttttcgaagaccagcccaacgtggtcgtctcgccgctcatcgtcgaatgcctgggcaccgccgccgccatggacccgcgtgttgccgcactcgagcgcctcctgttcgacgagagcctgtcctacagcgcccgccacaaccaggcagcgcgcctgataacgccgctgttcacacgcatgataaagttggatgaggaggcattgagcttttacgacctggtgcacctctacgacaacgagcaatcctacggcgcttccaaagatgccgccaacgacgagaacgcgctgcgccaagaggctaacgaaaccgagttcatccaggcgtcgctcgccacggtgaacgaaggtaatatcgaccagctgatcgccgacaacaacgaagcacccgtcgaggcgggcaagacgcccagcctcagcctgcccagcatgtccgccgaagcgaaagccatggcgttcctcgacgatggccgggcgtcctacgagcgcacggcagagcgctatcacgacaccatcgagcgcattgccgaggttctcgtgcgcatagccactccgcaggagcagttgggcgttttccgctaccgcgcccgacttgcccgcagcggcacccgcatgcatcccagcacgctcgtgcaagcccatctccaactcgagtccggttgcgagaatgcgatctggcagaagcggcagcggtgcagccgcccacagaacaggcagtttcacggcatggatatatacgtgctgcttgacgtgagcatctcaatgacaggaaaaaatgccagcagcgccggtgcactggcggtttgccttgtcgaaggcatcgatcggacactacagcttgccgcgcgcgatcagcagcagggtgcggtggatatacgcacccagctgcttgccttcggcgaaggctgggcagagctgacgcccctggagttcacccatgatcatgagcgcaagcgctttgccttcaacctggtcaacaaccccacgagcgagcaaaccctgatcaccgcagcactcaagcaggtgcaggcccgcgccgctgccgaaccgacacgcaacatcgtatgcctggtggtgggcgacggcctatttgccgacggcctgcaggccagaaaatgcgcgatggggttgccgcccaacgtttacctcgcgcacatcaacatcggcgcgttcaatggactgcccctgacgggcaacttcgagacgatccaggatcctgccctgctccccgagaagctgcacctcgtcttggcccggcagcttgagcgcccggacgactccctcgacgcccgataggctacgccacctgggtcttcggcgccagcttctcgctcgacttcccgaagaacacctcgtaccagcacaggaagcagtagatgttccagatgcgcatcatcttgagcttgccgcgtccctccaccgtggagaagtcggccgacttgtggtcgtcgagcatctgcacgaggtagtccacgttgaagaactcgtgcgcggcctcgctcgtgaacgcctccttgatgcggtcgtagtacaggtcggtctgcagccacaccgtgagcggcgtgatgaacggctgcttcggcatgttcgccaccttcttctggaagcccagcttgctcgcggccacgcgcagcgcgtacttcgcgtggtcgtcgtccacgcggcaggccgtgggcagctgcagcgccacgtcgagcaccttcttgtccaagaacggcacgcgcagctcgagcgactgcgacatggacatcttgtcggccttcaggcagatgtcgaagggcatgtagctcaccatgtcaacgtactgcgtctgcgtgatgatgtcgatgtcctgcttcgccgcctcgtcgaagtgcggcttgcaccattcccacggcttgcaggggccgtcgtaatcgcgcagcacgttggggatctcgtcccacatgtagttcatgctcgcgcgctggtagcttttctcggggccgcccgacccgcgcatggcgaagcggcgcccgtggaaggaggggagcttctcggccaccgcgcctgcggcggcgcgcagggggcgcggcacgcggaagtacttgccgaactcgaactggtcgtggtagatccagtacccgccgaacagctcgtcggcgccctcgcccgactgcaccaccttcacctgctcgcgcgccaggcggctcacgaagaacagcgggatggcgctcggcgcgcccaggggctcgtccatgtggtactgctcggtgggcacgatgtcgaggaactcctgcgcgtccaccttcacctgccagttcggcaggttggcccacttcgcgaactcttcggcgtcctccagctcgttcagtttgatctcgaagtcggactgcgcggcgatctcggccagcttgtcctcgcagccgatgtcgtagcccaccgagaacgtcttgatgtccggcgcgtgctgccccatgcagtacgcggccagcgagctgtcgatgccgcccgacaggaagctgcctatctcgacgtcggcgatctcgtgcgccgccaccgactcgtcgaacgcgcccacgatgacgtcggcccactcgtcgagcgacttcgagtcgtcgatcttgtaggtgatcttgtagaagcactcggtgcgcagctcgccgtcctcgaacaccatgaagtggccggggagcagcttgtgcacgcccttgaacatggtctgcgagtcgttcatgtactcgaagcacaggtactgcggcagctgctcgcggttgagctccttcttgaacgccggatgcgcgaggaacgccttgatctcgctgccgtagatgaggcgcgcgcccacgtgctggtagtagaacggcttgatgccgaacaggtcgcgcgcgcacacgaggcgcttcttcggcgcgtcccagatggcgatggcgaacatgccgcgcagcttctcgaacacgtccgtgccccacgcctcgtagccgtggacgatggtctccgtgtcgccgttcgtgacgaacgtgtagcccatcgcctcgagctcggcgcgcagctcctggaagttgtagatctcgccgttgaacgtgacggtcacggtgccgtcggtgttctgcatgggctggcgggagccttcgaggtcgatgatcgacaggcggcgaaagcccatcgcgatgtcgtcgtccacgaagaagccctcgtcgtcgggcccgcggtgggcgatgcgatcggccatgtccttaacgatggcctggttggcctcttggtcgtagtcgaccgcggtgaatcccacgaatccgcacatgtggctggttctcctttgcgtgcgtgcccttgcgcgcaacggcgcggcacggttcgtccgtatccttcggtatgatacgccacgcgcggcgaaaccccaagaacggcgatggaaaccccatcagtcctgcgaaaagagcggattctcgtagttctgcagcgttgaatagcgaatcatctgcgcacaccgaggatgaacgcttttccgtgcatgcttgtacgccctaatgtgcgagacgaacccttgatggatgcgccgttcctgaccgcgaatggcctcgaactcgtgcggcgtggccgtgcttgatgtgagagcgaaacggaagaccccatatggctccctcgatcttcacgagcagaaccatgtacggtctgtcgaccttgtgctcgatctccttccagtcaggctccgcatcgttttcgtagaaatcttctgctagaaacaccagctcgcgtttcaaagcagcccctcccctagaagcgagatgcctcccagaggaggcatcttctcagcgggctttcttttgtctgcgttggtcgcgccctacgaccaaaatctccttgccggcaagggcggcgacggtcaggacgagaccaccacgaaagctgcgcattaccggttcatgagacctataatgaggcatgaacgccagttaggaggccatttgaccgacggcgcctactgaagcagcgcaaaaacggaaaggtacgccgaatgagcgagagcaccgaatctcaagaaatcgtaaagtcgatgatgaacgtcgaaatcattccttcattcccgcgagaatctgccaaggaaagaggtctcttcgaactttcccttgccgatctggccacaggcggcatggccctctcgtcgcttgccggcacactcggatccttagcccagagcgcaaccaccgcacgcgagcagttgtttaggatcgattggcgtggctattcgggatctcttgccgagctcaaaaacgatcctggaaaataccttacatccgtcgtaggtgaatcgggcatagtgggacaagccggcctcgttcctgccgatgtcgcaaaagcggcgagcgctatagacccttacatgctcatgctgagcgcagcgctcgcaggtatcgagaaccagctgaaagatatccgtgaaatatctgaacggatcgtcgatttcctggaagaggataagaaagcctcgattaaaggaaacatgaacacgctcgccgacatcatgaacaactacaagcacaacgtcggcaacgaacgctatcggagtacaaggcaccagcaggttctggacatcagacgcgatgctgaaaaggatatcgagttttaccgatcaaaagcagaacggaacatgtccagcaagaaaactattctcacgagcagcgaggttgccagcaagctcaccaagttggatggtgatttcggaaactaccaagcagcgctctatctctacggcttctcgactttccttgaagtgatgttgctggaaaatttcgaagaagactatttgacgagcgtacgcaccaaactcgaaaagtattcgttgagctacaagcagctttacacagaagcatccgagtacattgagagccgatctcgctcatccgtgcgcgcaggcttgcttggcggcgtggccacagcaggcaaggggcttggaagagctttcggatctatgcccgcgctgaaaaagagccctatggacgaactccttacagacggcggaaatgcccttgaaggcatcaaagacaggttgacaaaaaacgatgttaagaccctcgccaggcgaaaagacagctgcatcgcgccattccaaaacaatatcgaaaccgtctttgctgctttccacaaaccaatgcaagtttttgccgacggcgagaagatattgctcaggcttaacgccgattgacgttggtccacaaccctgtcttcaactgctcctgaaacgaacgaacccgcctagcccaagaaggcgaagaaatcgtgcagcgacctgcaagagctccttggtgtgggataatgcgacgcagaccgcatacgaaggagattcaccgaacatgaccgacaactccccccgcatcgcctcggccgccgacgtggcgcgccgtttgcagcccgtcgtggtgggcggcgacatcctcgcgtacagctacgtgcgcgagctgcaccgcgcctacggcgtggagcgcaccatcgtgctggccgcgcacgacatcaagatgctctcgaccagccgcttcaccgactaccgcctggagccgaacgtccacgacccggagggcctctacgacgcgctcgagcgcgtggccgccgaggtgcgcgcggcagaccccgagcgcgtgctgctcgtgctcggttgcgacgactgtcacgcgcgcatgctctcgtcgggcaagccgcgcctcgaggccgccggctacacggtgccctacctcgacttcgccctgctcgacgacatcacgcagaagcgccgcttctacgagctgtgcgagcagctggacatcccctacccgcgcacgtggtacttctcgtgcggcacggacggccccgaggagctgccggtgcacgacttcccctacccgctcatcgcgaagccgtcgaattcggcgcaattccaggaagcgaccatcgagggctggcgaaagatctacgagatagagagccccgaggagctggcgcaggtctggcgcagcatccgcacgtcggactacaataacgagctggtgctgcaggacttcatccccggcggcgacgatgccatccgcacgctcaccacattctcggacgcgtcgggcgagctgcgcgtggtgtccggcggcgtcgtgtgcctgcaggaccacgaccccaccgcgctcggcaacccgctctgcatcatgggcgagcgggagcaggctatcatcgacggcgcgcggcgcttcctcaaggaagtcggctaccgtggcttcgcgaacttcgacatcaagtacgacgaacgggacgggagcttccgcttcttcgaggtgaacacgcgctgcggccgcaacacgtactatatgagcctgggcggccagaatttcgtggagctcatcgtgcgcgagttcatcctgggcgaaaccatcgactaccgcgaggcctacgaccccttcgtctactcctgcgtgccgcgctatgtgctcgaccgctccatggagaaccgcacgcgcctccagcaggccctcgacgtgctgcgccgcacgcccgagccctacccgctgcactacgcccccgactcgctcgcgcacaatttctgggcgcgcgtcatgcacgtgaaccagatccccaagttcaagcgcttctactgggacacgaacggcaagcagctgaaataggggatatctcgaacggggccatcccctttcgagaggccgcaaagagaaggggcgggaatgaaggcttgggaatgggcagtctggctggctctgtgcatcgcgccgctcgccgtggcggcagcatccttgggctcgctgccggacaccgtcgcgatgcacgtcggccccgacggcacgatcgaccgctatggctccaagtacgagctgctgcgcatagcgtgcctcttggcccttcccaacctcctcttgatgctcgcctcctggaaggcggaggcgctcttcgccaaagggctcgtgcacggcatcgacgacccccacaacctcagagtccttttcctggtgctcggcatgatcgaaaccgtcatctacgccggcgtcgtgctctcgttcggccgcggcgtcctcgcgggctaaaccgggcgccggtgcccctcctcgcaggtgagcaccacaggcccgtcctcggtgatggcgaccgtcttctcgaagtgggccgagggaagcccgtcgcgcgtgcacaccagccagccgtccggcatctggcgcgtcttgtgggtacccaggttgatcatgggctcgatggccagcaccatgccggcctccagcttcacgcccgtgtggcgatggccgaagttcggcacgttcggatcctcgtgcatgtcgcggccgatgccgtgccccacgtactcgcgcaccacgccgaagccctcggcctcggcgatgctctgcaccgcatgcccgatatcccccaagtggttgccgggacgtgccgcctcgagaccggcccacatgcacttctccgtcacgtccagcaggcgctgcttctccggcgagatgcggccgacggcataggtccaggcgttgtcgcccacccagccgtcgacgatggcgcccgtgtcgatggagatgatgtcgccgtcctgcagcacgacgcccgccgatggaatgccgtggacgatctgctcgttgacggaagcgcagatggagccggggaacccgccgtagcccttgaacgcggggatgccgccctccgcgcggatgagcgcctcggccagctcgtccagctcgagcgtggacacgccgggccgcacgcgcgcccccacctcgcgcagcaccttggccgatacgcggcccgcctccttcatggcctctatctcggccggtgacttcctgatgatcatgcctcgcccacaccttccgcacgtcgcgtctgtttgctgccgaccagtatcaatctataaggaaataaaagcaaatcgaaaaacaggatatatgcgaacccaccaaaggaaaaagctatgacccgtcgatttttcagtataatcatctaggccccgttaacgatggggtcttttttttgctttcgttttcgattaattttttagttccgttcccaccattctgtactaaagtagctggccttgtcgcggggcgcctgtcctcgagcagtattctacggagcctgtcggcatcaatcttatcggcgatggacgggcgccgctggaaccggtggcatgattagttaggctctcgaagagcaatatatatacgccagtgtccggctccagcgacgaccagcggacgagccatgcatagcacgtccggttcattattataggcaacaatcgtgccaatttgccgaggagcgaaaaggtttcaggctttttcatccaggattagggtgtgcaaaattaacccccccatgctctataatgtggggagcgcaaaggacctgcttccggaaaagggctaggctgttgcgcgatgcgacggctcgtagaaggtgccgttagccaagagggcgtagatgaggtctacgcgccttcgcgccagggctcggagcgcctgcttgtgctgcaagccctcggcgcgtttcctgtcgtaataggccttgcagcgcgggtcgtaccgtttcgctttctgcgccgactcgatgaacgcattcttgagcttccggttgccgttcttccttttcttgttcttcttgacgctcgtgcccgactcttccttcacgggcgcgatgcccccgtaggaagccaggtggttcgcgtctgggaagcggttgatgtcgccgatctcggcggcgatcgtcgccccgtagacgcgcccgatgcctgggacgctctttaggatcgccgtctcgggcaccgcatcggcgcgctcctcgatggcggcgtccagctccgattcctcctggtcgagctcgaggatgcgcttggctagcttcttgatctgaatctcgatgacctcggttgccgggagttcaaccgtcatggtgccgagcgcctcgaacacctcctcaaccttcttaggcccacgggttttctgatacttgaggcttcccgcccacttggagacgcgggccttgccagcgcgtttgagccctcgggggccgccgtagcgctcgaatatttttatggccagatcggaatggaggctatcgccctcgaaaagctgctcgaggggcggggacacctgcagcaggaggtcgtgcagtcggttgtagtagcgcgtgcgctctttgacgatgtccacccgccgcgagttgaggactttgatttctgcgaccgcgtcgtcgcgcgtgccgacagttcggatcagcctcggggtgctgagggacacgtcggcgatgatgaaggcgtccttggcgtccgacttgccttccttgtaggtctcggcgatgttcttgaagtccttaggggtgatatgggcgacgtcgatccccatatccttggcgacggccaccacgagccgtccgatgttgccgaactggtcgacggttacgagcaccttgccatgcccgctcgcctcttccaacaactcgcggatactcgcctcatcttgatcgaagggccgggacagcaaccgttcgcccgtcgccccgtcgagcgccaccgcatggtgcttggtctttcctacgtctacaccgacgtacacgtcgtaatccatctccgcccgctccatagttccccttcctcgatgaatggaagctggccttgtcgcggggcgcctgtcctcgagcagtattctacggagcctgtcggcatcaatcttatcggcgatggacgggcgccgctggatccggtggcatgatactgggagctataggtagcattagcactgcgccggtgtccggttccagcgacgaccagctgcggaagccatgcatggcttccgcaagagaattataagcaaaactacctagtagaatagcactccctttccaccccgttacgcatcccccacgctcggaaaacgcctgcgcgcacgccccctggagcgcctgtgcgcccctctagcatggaggggaatccgcgtccgcgccgacgagccggagcgcaccgtaccagcaaagaaggaggctctatgaacccgtttgagcagaagccgaagaagtcgttgatggagatggtccccaactggaagcagctcgccgtcaagccctacgacaagctcgaagccgacccttacaccaaggcgcgcatcatcctcatgaacggcatcgaggttgaggcggcgatgttcggccacaacttcaaccgacactgcgagaacaacgacctgcgccgcgacctggccctgtgccgtcgcatggagcaggagcagcagaagcgcatcaactggatgagcccgagcaacgaatccacactcgagctcaccatcggttacgagcagctggcggtcgacctcacggcgtggctcgccatgcacgagcccgacgagtacgccaagtcctgcatggacttcgctctgctcgaggacttcgaccacctgtaccgctacgccgaccagctcaagttcgacgaggacatccccgcgcacaagctcgtgcgcgacaccatcgagatcaccccgggccgcccgaccatcgcgcaccatcgccacccgttcgactccgtgcgcatgccgcgcaactccaagaccggcgacatccgcacgacgctcggcgcgctcatcctcaccgcaggcgagcagcagacgatgaacttctacatgaacctgggcaacaccgtgcccgagggacctggccgcgacctctaccaggagatcggcatggtcgaggaacagcacgtgacgcactacggctcgctcatcgacccgtccatgagctggctcgagatgctgctgtggcacgagtaccaggaatgctacctgtactactcgttctacgagaccgaggtggacgcccgcgtcaagaagatgtgggagatgcacttcgagcaggagtgcatgcatctctccatggcctgcgatctgctgcagaagtacgaggacaccgagtggcagcagatcattcccgccggcgagttccccgagcttctggacttccaccccacgaaggactacgtgcgccaagtcctggccgaacaggtcaccctcaccgcgcaggacgaggagttcgtcgacatcgacgacgtgccgagcgacttccgcttcttcgagtggaacgacacggtgaacggccgcgtccaggacgtgccgagtcatgaggccgtgcgccagctcatcgagcgcgacggcgaggactaccgctccgaggacgccgagagccccatcccggagctccgcagccgcaagaaggacgacaccaagctcgcccgcgtgcagggctacggtaagaaggctcacgaggtcgagaagcagaccaaggaagagcgcgaggccgtgctcgcgtaagcgcaccacccaccgtcagcaagcgaacagggcgcccaccgggcgccctgttttctgtaggacaagggttcttcccttgccgtcgggccgggctcgcccgcaggtggcggcaagggaagagcccgtgccctacgcctcttcccggccttctcccccgtcttcgccgcccggcggcctcagtcgcccggcatccttcagcgcgcggcggaggatgaactccacctgggcgttgacgctgcgcaggtcgtccgcagcccagcgctcgacagcctcccagagagccgggtcgacgcgcagcgggtattgtttgcgtttcgccatatctcacaccgcgggcgccccggcaaacgcgcggggcgcccgcccttccctactggtacagcgtccccgtgttcagcacgggctgggcgtcggactcgccgcacagcaccaccatgaggttcgacaccatagcggccttgcgctcgtcgtccaagtctaccacgttcttgcgcgacagctcgcccagcgccatctccaccatgcccaccgcgccctgcacgatcttctcacgcgcggctatcacggcgtccgcctgctggcggcgcagcatcgcctgggcgatctccggcgcataggccaggtgcgtgaggcgcgcgtcgtctatcaccacgccggctttctccaggcgcacggccagctcctccttgagagcggccgacacctcctcgatgttgctgcgcagcgttatctcgccctcaggctctccgggcatctggtcgtaggcataggtggtggccacgtgacgcagcgccgtctcgctctgcgtgtgcacgtaggagttgtagtcgtccacgtcgaacagagccttcgccgtgttctcgacgcgccagacgatgacgtcggctatctcgatggggttgccgcacttgtcgttcaccttcaggtgctctccgttgtacgtgcgggcgcgcagcgagaccttcgtggacagcggcgtgctctttccagtgcgcgcatcgacggtgctgccggccgagcgcgagtagaacgggttcgcccagtggaagccctcgtcgcgcaccgtgcccttgtagtcgccgaacaggatgagcacgcgcgcctggttcggttggatggtgaagaagcccatgagcatcaacaggggccccacgcagagcacgacgatgcccacgaccaacagcaccacgcccatcgtgtgggccggcgtggcgaggggcatgtcttcgggcggcagcatggtcgccccggccacgatgcaggcgacgcacgcggctgcgagaacgaacgtgagcagcagcaggggccagccgttccttgcgtggatggttttctcgacggacgcgccgccggtcgcacgcgcggtcttatcggacatgacggttcctttctctcccgaacaagacgccctatgcgcccgtccgcaccctcgcaccgcaaggtgatacgaatatgatatcacattgagatcgcgttgacgagagcgtgcgagaatgcccgcgagaaagaccggcgtcgaactccgccgcactttctcattttttcattttacgatgtttcacgtgaaacatctgttcgcgtatcaggccaaaaagaaaggagcccttgcggactcccttctcttcaagcgttcggcttcgtgcgctcggctactcgccagcctccgtgtagttgcgggtcacgctggaatcgaccgacacgcccggcgtcatcgtggcggacacggtgacggacttcacgtacttgcccttggccgcagccggcttcatgcgaatgatctcgtcgtacacggcaccgtagttctcggcgagctgctcggccgtgaagctgaccttgccgatgatgacgtgcgcgatgccgtaacggtcggcacggtactccacgcggccgcccttgagctcgttgatggccttcgccacgtcgttggtgacggtaccgagcttcgggttcggcatgaggccgcgggggccgaggatcttaccgagacggccgaccttgcccatctggtcgggcgtggccacggcggcgtcgaagttgaactcgccggcctggatctgctgcataagctcgtcggagcccacgatgtcggcgccggcctcctcggcagcgcgggcagcctcgccctcggcgaacacggccacgcggaccgtcttgcccgagccgttcggcaggctcacggtgccgcggagctgctggtcggcctggcgggtatcgatgcccaggcggaagtcgaccgtcaccgtctcgtcgaacttggcggtggagacttccttcaccaggttcatagccgccagcggcgcgtaggcctcctcgccgatcttctcgatcgcagcacggtagttcttggacagtttcgtcatgttggttcctttcgtggttcgtagcgggcacatggcgcgcccttccactgccttttatcgctcaaacgcccgcccggtcggacggccgtgtttgcgctttggttcgccgaaggactagtcctcgtcctcaagcgtcttgccctgcagcatggcggcaaccttcttggaaggcacgtacttgatcttcatctcgcggccctcgatgcgcacgcccatggaacgagccgtgccggcgatgatctccatggcggcctcgatcgtgttggcgttgaggtccggcagcttgatctcggcgatctcgcggagctggtcctcggtgagggtgcccacggactgcatgtgcgggatgcccgcgccgctcttgatgcccagcttctccttgatgaggatggccgccggcggagtcttgcacacgaacgtgaacgacttgtcctcgtacaccgtgatctcgaccgggatgatggtgccggactggtcctgcgtctgggcgttgaacgcctggcagaactgcatgatgttgacgccctgggcgcccagcgccgggccgaccggaggagccgggttcgcggcacccgcggggatctgcagcttgataaagccggtttgcttcttttcagccatgataactaccctttcagctgatcataacgtttcgaaaatcaatctatcaacacagcggcatatgtcgaatgagaagccccggtccacgcgggcacgcgacgccgccgatgttcgctaaatcttggcgatctggtcgaacgagagctccacgggagtctcgcgcccgaagatcgacacgagcaccttcaccttgccggcatcgggggacacctccgagaccacgccgtcgaactccgccaacggtccggaaaccactttgacggactgccccacctcgatggaggaggacgtcttcttcggcgtgccgggacggtttttgtccgagcgcatgcccatgatcttgttgtactcgtcgcgggtcagcggagccgggttgccctggctgcccacgaaacccgtgacgcccggcgtgttgcgcacggccgcccagctgcggtcgtcaagctccatgcggacgagcacatagcccgggaacaccttcttctcgctctcgacgcggcgcccgccctctttgatttccgtcaccatctcggtggggatctcgatggcgaacacgttgttctcgaggcccatggtctcgatacgcgtctcgaggttcttcttcaccttgttctcatagcccgagtaggtgtgcaggacgtaccatttcttcgacatgtccttaagcccccaaactcgagatgcccacgagaaccggtgtgatgatgacgttgtcgagaagagccacgtacacgccgaagaacagcagcgcggccacgacgacgacgctccagcggagcacgtccttcttcgtgggccacgtcacgcgcttcatctcggcacgcacgtccttgaggaagccgaaacgacgcttcttgggcttgctctcgaccttcttctcggctttcttctctatcttgcccttgtcctgcttgttggcggcaggggtctcggccttgtcggctttcttgaaaaaccgcttcttgggttccgcggcggcatcggcctcggcgatatccttcgcctcgactgcggcgctctcggcctcgagggcctgcgcctttcgtgcggcgcgtgcggccgaggcctttgcgcgctgtgttttcgatttcttcgccatctggttccttcgcccgagaaaaccgggaaaatcgttatccgtctaaacgccaaacaagcagcctgattccaagctgctcgaacaagcaacctgaatgcaagctgctcaagattaacaagctggcaggccaggagggactcgaacccccaacatgcggttttggagaccgccgctctaccaattggagctactggcctattgcttgtcctaccctgataacgctatcgagtctctttgtgcgtcgtgtgatgaccgcaccacttgcagtacttcttcaactcgatgcgatcaggattgttctgcttgttcttcttggtcgtgtaattgcggcgcttgcaatcagtgcaggccaaagtgaccaacgtgcgcatgaattctcctcttatcgcttacgtgtcgagcttgataacgtaatcggcatacacatgaattctcaagggcggggcccgccggagcggaccccgcgttactggtgaagcggtgttacttgatgatcttcgtcacgcggccggagccaacggtgcggccaccctcgcggatagcgaagcgcaggccctcttccatggcgatcgggtgaatgagctcgcccttgatctccacgttgtcgcccggcatgaccatctcggtgccctcgggaaggtgggcaacgcccgtcacgtccgtcgtgcggaagtagaactgcggacggtagccatcgaagaacggcgtgtggcggccgccctcttccttcgtcaggatgtagacctggccctcgaactcggtgtgcggggtcacgctaccgggcttgcagagaacctggccgcgcacgatctcctcgcgcttgatgccgcggagcaggcagccgatgttgtcgccggcctgggcctcgtcgagcagcttgcggaacatctcgataccggtgcagaccgtgttctgggtctccttgatgccgatgatctccagcgggtcgttcacatggagcgtgccgcgctccacacggccggtggcaacggtgccgcggccggtgatggtcatggtgtcctcgacggccatcaggaacggcttgtcgaccatgcgctccggcgtggggatgtaggaatccaccgcgtccatgagctcccaaaccttctcctgccactccttgtcgccctcgagggccttcagagcggagccgcggatgatcggggtgtcgtcgcccgggaactcgtagctgtcgagcagctcgcgaacttccatctcgacgagctcgatgagctcctcgtcgtccaccatgtcgcacttgttcaggaacacgacgatgtagggaacgccgacctgacgggcgagcaggatgtgctcgcgggtctgggccatcgggccgtcggtggcggcgataacgaggatggcgccgtccatctgggccgcgcccgtgatcatgttcttcacgtagtcggcgtggccggggcagtcgacgtgagcgtagtggcgggaatccgtctcgtactcgatgtgggcgatggagatcgtgatgccgcgctcgcgctcctcgggagccttgtcgatgttctcgaaggccgtgaagtcggcgcgggcggagccgtggctgccgtcgttctcggacagcgtcttggaaatggcggccgtgagcgtggtcttgccgtggtcaacgtggccgatggtgccgatgttaacatgcggcttggaacgctcgaacttctccttagccatgtttcatcctccttatcaaggtttcgcttgcgcgaaagtcaaaacaaaataatgacgcgcccggaaacggacgcggaataatcaaaatggtagcggtgactggatttgaaccagtgacgccacgggtatgaaccgtgtgctctaaccaactgagctacaccgccatgttagaaaatggagcctgcgatcggacttgaaccgacgacctcttccttaccaaggaagtgctctacctgctgagctacacaggcgattagatggtgggcgcgctaggattcgaacctaggtaagcatagctaacgggtttacagcccgtcccctttaaccactcgggcacacgcccctgtttcgctcaattcatgtgtatttatcaagctgcctgccgcgtgtttcggtagttccgaacgcgcgagcagatgaataatacgctaggatcaccagcgtgtcaactacctacacgcccccgggcgtgtctccacgattcctcctttttcgtggggaaacgcttgcggtccccctcctcccccgccctatgcggcgtaaaaaaatttcccgaggcgggagcgtcatcgttttgccgaaggcccatctatatttatagagtaaggcctctgcatccattttgcgcggtatgatgcggagaacgacggaagaagggccgtactgccggacatgaggccgcgccagtcatttggtgcggatgcatcctcgcatagggcgcgcaacgtcctggcgactgccgcgggttcgcccttgctggttgggcaaccggttccctactatatataggtcatgcttccctatacgttgtggtcatctatttcccctgttccacggcttgtttgccttcgtttgacgtcctcggaacggttgcgcgtcctcggcttggaaaacccccatcgttgatctgggtttatgaaacgcgttcacaacaatttttgtccatctgcgcaaacgtgttatgatgcgcactgcttttgcccacacatactacgtgctcaattcaggaggtcttcgaatgagagagcatacaaacggactcagcaggcgagcgttcattggcggtgccgtcatgctcggtgccgcatcgatcgtagctccgacgaccgcattcgcggcgacggctgcggagaagcaagccgaggcggacgccgtccgcaaccagctcgtcggccttcaggcggatctcgaagccgccgccgacagttacaagcaggcgctcgacgcgcaagaggttgctcaggctgccatggaagccgagcaggtcaaaatcgatgaagccaacggaaagatcgccgatcttcaggacaagctgggaacgcgtgcgcgcagcatgtaccgctccggttcgtcgaacttcctcgattttgtcatgggcgcgacctcgttcgaggagttcacgcagaactgggacctgctgaacaagatgaacgagaacgacggccagatggtcgacgagacgaagaccctgcgcgaggagctgcaggcgtcgaaggacgagtacgcccgccaagagaagatcgccgccgacaaggccgccgaggcgaaggtcatccaaaccgaggccgaggcgaaggtcgcccaggccaccgagctggtgaactccctggacgccgaggcgcaggcgctgctcgccgaagagcaggcagccgccgcgcgtgccgcagccgagcaggccgcggccgaagaggccgcccgccaggcgcagaacaacaacaatggctacaatgcgccgagcagcaacagcaacaatacgtacgtgccccccgtctacaacaacggcggcggcggtggcggtggcggctccgtgggcaactacggctccgtcgtggactacgccatgagccgcatcggctgcccgtacgtatgggccgccgaaggcccgaacgcgttcgactgttccgggctcgtgcgctgggcgtacctgcaggtgggcgtctcgctcccccattacaccgagtcgctgtacgcctgcgcgaagaaccgcgtgcccatttccgaggcgcgcccgggcgacgtgctgtaccgccccggccacgtgggcatcgcggtgagctacggcgggtcgcattatgtgcacgcccccaccttcaacgcgtacgtgcgcgacacggacccgctgtcgtgggccgacttcacctgcgcgctgcagttctaggccgcaccgtttcaacctggtttcgcaaggagggcctcgggccctccttttgtataataggggcacttcactccccgcgaaaggagcatgcggcatgaacatctccgtgagcctggaaaacggcctcctccccgaccggtacggcaagcacgcgccggccgacgcgatgctggacgggcacccgtgcgtatcgttccccctgtcgatagacgacgtgcccgagggcacgcgatccctggcgctcacgttcctggactgggacgccatccccgtgggcggcttctgctggatacattggatagcctgcaacttccccgccgaaacgcgcctcatacccgagaacgcgagcgcctcgggtgccgtgccgtgcgtgcagggatcgaacagcgactggtcgccgctggcaggttcgcataccgacccgcgcatcatccaccgctacgccgggccgtacccgcctgacaagacgcacgattacacgctgaccgtgtatgcgctcgactgcgagctggacctggccgagggatactacctaaacgagttccgccgcgccatccgcggccacgtgctggccgagacctcgctcgagctgccgagccgcgcctagcgatatgcgccgccatggagccgacgcatatcgagcacccgttggaaccgatcttcgatgcccggtcgcgcgtgctcgtgctgggcacgatgccgtcgccgaagtcgcgcgaggcgggcttctactacgcgcatccgcagaaccgcttctggaaggtgatggccgcgctgttcgaagagccggagcccctcggcaacgaggcacgcgcggcgttcatgttggagcggcgcgtcgcgctgtgggacgtgctggcctcgtgcaccatcgagggcgcctccgatgcctccatttccaatgcccgcccgaacgacctctcgcgcatcggcttggccgcgccgctcgaagccgtgttcaccacgggctcgaaggcgacggggctctaccggcgcttctgtgcaggcatgcttccgggcgtgccgcacgtgggcttgccctccacgagccccgcgaacgcccgcatgcgcctggccgacctcgtggaggcgtaccggccgctccgggacgcgctgcgccgaagcgcctgagccccggcgcgttggcctgcgcaaccgcgggtcggcggacgttccgacagtcgtaccaccgcctcccgcgcccagtcgcgcgggaggcggccgatgcgggacggcggcagacaggcgtggtcgcctgcgaacgcagctacttctccgccttctcgggatggccgtggtccttctgccagcgatcccaggtggaatagcagattgcggcgcgttggtcctggtcgggccatttgtccttctcatagcgggtgatgtgctccatgcagcgggagatgtacgtctccttcttctcgttgccgcgagggtcgggtatgggcatgtcctgcctcctttcgccgggccggcagcgcggcgcgccgtcggccgtccgggtaacgtcagccgcatcgtaggcgacgtgcgcccggcgcacccggagtccctgcagttgcgacacggcggtttccgccgggttgccctgccgtcgcccgctacgcggcgccgttcttgcagccaattgctgcctcgtgacctacttccctccccatcagccgcctcaagccgaacctcccgcggacgcgcttcctcccgaggcccccgctgcctgcccctaccttcccgcacgttcacgcgggaaatccgcgtcccgacgcaatcgcggtcgacgcgtaggatgccaagtcgtatactggctggtggaattggcagcacagagcgaaaggatgcacacgatgacaacgtacgcggacctgcccggagacgagctcggctccctcaaggccgagttggaggcgcagtacgccgagatcaaggcgcgcggcctcgcgctcaacatggcacgcggcaagcccggggccgaccagctcgacctgagcatgcccatgctggccacggtgacgacggccgaggactgccgcgcggaggacggcacggactgccgcaactacggcgtgctggacggcctgcccgaggcgaagcgcttcatggcgtgcatggtggaggaggacccggcgaacatcgtcgtgggcggcaactccagcctttcgctcatgtacgagaccgtggcccgctgcctcgacttcggcacgctcggttccaagccgtggagccagtacgacggcatcaagtggctctgccccgtgccgggctacgaccgccacttcggcatcaccgaggcgttcggcatcgagatgatccccgtggccatgacggccgacggccccgacatggacgaggtggagcgcctcgtggccggcgatgcctccgtgaagggaatctggtgcgtgccgaagtactcgaaccctggcggcgtgacctactccgacgacgtggtgcgccgcctggccgccatggagtgcgcggccgacgacttccgcatcttctgggacaacgcctactgcgtgcaccatctctacgacgacgcggccgaccaggaccagctgctcgacatcggcgcggcgtgccgcgaggcgggcaaccctcaccgctacttcaagttcgcctccacgtcgaaggtgacgcaccccggctcgggcatctccgccatcgcggccagccccgacaacgtggccgagatcaagaagcgcatgggcgtgggcaccatcggctacgacaagctcaaccagctgcgtcacgtgaggttcctgaaggacgccgacggcctggcggcccacatggccaagcacgccgccatcctgcgcccgaagttcgagctcgtggtgagcaagctggacgagggcctgaccgaggtgggcggctgctcgtggtcgagcccgcgcggcggctacttcgtgtcgttcgacgcccccgagggcacggcgaagcgcgtcgtgggcctggcgaaggaggccggcgtgaccatgaccggcgccggcgctacctacccctacaagcaggacccgcgcgacagcaacatccgcatcgctcccaccctgcccccgctcgccgagctggacgccgccatggacgtgttcgtgtgctgcgtgaaactggcctacgcggagaagctgctgggctaggacgctcagagggcacgacaccgcgtcgcaccccttccccatcgattcccccaggcgacccggcacccgtgccgggtcgcctcgcattcgccgcctcccgcgtacgtcgacgccctcgcgaggttctggcaattttgatagcttgcattttcttcgacaacccccctatactcgaagcgaaaaacaacgacggggacaacctctcggggacggggaacacgacgatgctgacccttagcgtgtacagcgcggacggagagtttatcctcacgtgccagatggaggatatggcgtcgtttctccatgtcatacacacggagttcgagccgcgttgggctgccgatcctaacaaggccgccatcagcggaaagatgctcgtcatagactcggtgcgcggccccgattcaatgacgcctgtgctgtcgcagcgccagcgggaaatcgtcgagctgctgtcgcgctcgtattcgccgaagcagatcgcctgcgcgctcggcatatccgaatcgaccgtgcgcatgcacatcaacacgctgaagaagcgcttcaacgtgacgagctgctaccatctcatgacggtggtgacggcgctcgggctgtgcgaccctttcgttgacgagccgcacgaaaagtccatcaccctcctctacgatgacgaccgcggcctgcgcaaaccgagacgcctacagcctcccagggagccggaagacccgagagcctcgcgaaaggaaggggatggaaccccgtagccggcatactggatgccggctacagcacgtatcctagcggttcacgtcgaagtcatcggggcaaagctcgcgcgacgggctggtgtggggcagcttctcgaagcccacccgcacctcgtcgaggtcgcgatagccggcggcctgcagccgcttcacttcggcaccggaaatcctcacctggtacttttccgctccgtcgaccttcgccaccaaaagctcgccccacatacgcacgggcggatcgcccttgaagaaccccccgtcgcccgcccgccgcaccgtaaggcccacctcctcggggccgaaaccttcggccatgaggtcgaggtaggcctcgggaggcaggcccaccaggcactcgagatggcccatcacctcgcagaagaagagcttgcccacggtggcagagcgctcgtccgggcttcccctcccagcacgcccgcacccggcatccggggccgggtgtgcgctcgcacagcgctcgtcggcaccgtaccggccagacggatcctcccaggcgggaagattgcccctaccgtttctttcgttcacgataccgcctccttcaccgcaacgccaacctcggcatcagctcaccttcccagcgttttcgatgcaccgggcgccttggggacactgaaggcgcccggcgccttgggcgccccgtcagcaccggaaactcccggagccccggggacgccgggagcgccaggggcgccaggcgtcccagacgtcccgggcgcggaagcagaaggcagctcggccccgcatgcaggacaggaggtcgttttgggctcgcagtcctgcccgcaggcggggcacttgctgtcgagcgataccgtcgtcggtctgaagcacattgccttcccctttcaatacgccgcttcgtcgtcggtcgcgctgtcgtgcacggccaacttcgactgggcggacaaacgttccacgaagcgacgcacgcgctgggcccagcggtcgaacacctcgcgcgcgtcgtcaaccggataaagttcttctttgaagtagcggcggaacagcacgtcggagaacgcggcgtagtcctcgcttcgcatggcctgctccatcgcgaaccccggcgctatcatagcggccaggttcgcggcctggtacagctggtagaaggccacgcgtatccgcgcccgcctgcgctctccgtcttccgttagcgcctcgtccataagctcgctcgcccgccggatgcccgcgaaggcgtcgtcgtaggtcgttgccatggcgcacccccgccctaggcgaacagcttcgccatagtctccctgtcggacaggccaacgcgcgtcggctgcgtctcgcggccctgcttctcgaagtggtagacccgcacgtcgtcctcgcccaggccgtcgcgctcggccaggtcggccagcgtctggaggatatggtcggagtgcgaggtgatgagcacctgcttgccctcctgcgccatgccgagcaggatctcggccatcgtgcgctggtagcgcggatgcaggtgcgtctccggctcctcgaccatcacgagcgcgccctcttcggaaagcgagcccagcaccacggtggcaaccgactggttcacgccgtagccggagttcacggcgctcacccacatgccgccctccacgaggtccaccaccacgctcggaccgtccgtcacgtgcgggctcacctccacgccgagcttcgccaggcgcgcggccatcacgtcgaggcgcttctgcatctcggggaagcgcttcgcctcgttcaggcggtacaggatgaggttcgacagccactcctccaaagccgacgcatctccggcgcggttcgagatgtcctcgacagaggggtttccggccagaagcgggtagttgtagcgcgtgaagccgcggttcgacgacaggtagagcgcatcctcgaaccacttcagcagagctttctgggcggacagcgttcccgtgtaatcatcggttgcataggtgccgccaccgtagccgccagctgccagcgggaagaacagcctgcccgacgcctcgatgacaccctccttccggctgtcccacgaccatgcgcgctcgccgccccgcgagaacgactcctccacgccctcgggcgaggtttccaagctgtacgccatctcgccgggaccgtcgtcgagcgcgacctcgatgcgcacgggctgcgaagcatcgtggccgtacgctacctcgcggaagtcgccgaggcgcagcaggtagtcgttgtagctgatctccttgcgctgcaagctctgcttgatgaaggcgagcgactggatcaccgaggtcttcccggtggagttgaaaccggtgagcaccgtaaccttcgcgaagtcgaggtcgatattcttcagggccttgaagttctccagatgaacgcgcttgagcatgacggtcccctttcgatggagcggttgtgtgattaccgtgcgaggcggcggatggccgccggatgggccggcctgaccgaaagcgcgcgcacggggcaccacttcacgcagtcgccgcaccccgtgcacacgtagccatccgctatcgcaacctcgccgtcgcgggctgcgaagttgccccgagcacaccggcgcacgcacgctccgcagttgcagcacgcactgccgcgccggatgatgaacggggactcgctcatttctcgtcggcctttctcttacgcccttaagccggcgctagccgaacagcgagcggaacggcacgtcgtcggcgcggtgcacgttgcattgggccagcttgacgttgtacacgcccgacagcctgcagcagttgtcaggatcgttgtcggtgcacatgttgatgttggacatgaaccagccgccgagccacggctcggactcgggcagctcggggaaccatcagccatgctgagcagccacggtgtagggcgacaccgatgcgtcgagcttggccttctgcaggcagcggccgcggcgcgtctcgatccagcaccacatgccgtcgccgattcccagatttgccgccgtctcgggatgtatctggaaatgcggctcgggatagcggtcgcggcacccgttcacctggcggtactcggaatggtagtacggcatgacgcgcgagccggccgtgaggatgagcgggaaggcctcggccacgtcgggggtggaaatcggcgactcgaaaggctcctcgtagtagggcagcgcctctttctcgtcgaacaggtcttcgatgatggtcgagcgcggctccaccttgcccgtaggcgtgccgaagccgtagagctgaccggtcttcggatcggacatcttgtgccattcctcgggcgaggggttgaacacgggatccgtgatggcgccgcgcgccgaggtgccctgcggctcgagcatggcgtcgtaggcctcctcggtggtctgccacgaccagtacttctcgcacgtctcctcgtcgaacgtgccctcggccagcgagcgccagaactcgtagttgtcgcggcgctcgtacagcggcggcacggccgcctcgcccgtgagggccacgccggtgatgcacgggccgcccccgcccacgccccacagctgcggacgctcgagccagccggcggccggcagcacgtagtcggagagcatggcgagcggcgtcatggtgtactcatgggttatcaccaggtcgagcagcttcacgcactcgtacacgtcctgggtgttcgagaggttcgagaacgggttcgacgcctgcgcgatgaggcccttcaccggatagggcttgccggtgcggatggcctcgctcacagcacaccagttctgcgcgcacgtggcgttctggctcaggaagtagggatggtggaacacgcggctctgggcatcggagatcatctggtagctgggccatgagtggaacgggaagcggtcggagccgagctgcttgtcgcgctgcgacttcggcagcatctcgggcatctcgaacgtggcgtgcggcagcacgtcgttgggaggagccaggtaggtctggcccgccttgttgatgccgataagcgccttgaggcatgccttggcgcggttggcctgcgcctggttgcgaccgatggcgtcggtggccaggccccagggcaggtacgccggcaggcaggtggcgtacatgcgcgccgccttcacgatcttctcggccggcacccagcagatctcggccaccttctcgggcggataggcctgcacggccttcttcaagtcctcgaagccgtacgtccacgcctcgacgaactccttgtcgtagagctcctcgttgatgatgacgttcatccagcccatggccatggcgccgtcggttccgggccgcaggcgcagccatacgtcggcgttggccgcgtactcggtgcagcgcgggtcgaccacgatgagcttggcatcggggtcgttcgcgaacaggtcctggtagccccagtgctcggggaagtcgccggattgggcggggttgtgcccccacaacaccacgcagcccgtcttggctgccgtgaaggctgctgcgaactggccgtacgtcgcgctctcgttcgtgtacgtggggcaccagcagatctcggagccgcccatggccaggttggggctgccgtacaggttgaagaaccgcccttcgtaccactcgtcggtgcggcccgtgccgtgcgagaagatgaccgactcggggccgtactcgtcggcgaggtagcgcagcttctcaccgatctcggcgcacgcctggtcccatgtgaggcgctcccacttgccgctgccgcgcgcgcccacgcgcttgagcgggtagttgcagcgcttcgggtggtcgagccactccagctggaagtccatacgctcgcacacccggccttggctcaccgtgcactcggggtcgccctcgagcttggtgatcttgccgtcctctactgttgcccgcacgccgcagttggcatgcgaggcgaagcatagcgctcgtttgtactcgacgtttgacatagttcgcccttcttcctctcaggtcgttcgcttcgtcgaatggctgaatcgaggatgcgcggaacctaaggcgaaggtactcccccgtgcccgccgcgccaagctgtcaaatttgatggatgggggaatatggagaagggcccggacgcctcggcatccgggcccttgcgctcaggcctgctcccggcccgtcgcatcctgcacggccgcttcgggcgcgcccggcagggggacgcgcagtatcttgcccgctatcgccatgcacaagggctccacctgcaccgccaccacatagcagatcgcccacatgagcggcataggcgcgagcagacggttcacgaacagggcgtccatgccggtgaccatccacgtgagcacgaacgagataacgaacacgagcaccgtgcacaggagcacgtccttcaacaggaaccaacccgccgatccttcgggcgccccgcaacgcagtgcgtacttcatggacagaggtatgagcggaaacgccgccaggataacggtgcccaggatcgtgcccacggccacgcccacggcgaagcccatgggctcgaacggcgcgccggataccaccggcgagaacgcgctcatggttatggccaggaaaaacgacatgagaaagcccataagggcccgatacgaaaacgtcatagaacccccttaagccgagtcgaaaagacatcgctgcaccatcgcatccccccttcgagcgagtcgacatgtagtgcgcatcttcccatcagccaggctccatggtagggggcggggcgatcgagcgtaagctatcaaacttgccagcccgctacccggccgctccagccgtcccttccctccacgtcgcctatccgccccttgacgcagaagaaccgccttgcggcggttcttcggtgggaatctgtcctgctaagcggccttacgcctgggcgtagaggtccttcagcttcagcaggtgctcgtagcggtccagggcggcctgctcgttgcgctcgaagagctcggtggcgcgctcggggaactcgcgggtcaggcggctgtagcgggcctcgttcatgaggaagtcctggtagccgcccgccggctccttggagtcgagcgtgaacttcttgccctcgggcgcggccgggttgaagcggaacaggttccaatagccgcagtccacggccttcttcatctcgtcctggcagttcgccatgccgcccttgatggagtgcatctcgcacggcgagtagccgatgatgagcgacggtccgggatacgcctcggcctcggcgatggccttgatggtctgggccggcttggcgcccatggcaacctgcgccacgtacacgtagccgtagctcatcgcgatctcggtgaggctcttcttcttgatgtccttgccggccgcggcgaactgcgccacctggccgatgttggaggccttggaggcctggccgcccgtgttggagtacacctcggtgtcgaacacgaacacgttcacgtcctcgccggaagccagcacgtggtcgaggccgccgtagccgatgtcgtaggcccaaccgtcgccgccgaagatccagacggacttcttggccaggtagtccttctcctcgaggatggcgggcgccacggggcagccgtcggcagccgcggcctcaagggccgggatcagggccttggcggcctttgcgttggcggcgccgtcggaggcggtgtccttatacgccgcgatgagctccttggtcgcatcaggcgtcttgtcgctggctgccatttcctccagcttgcccatcaggcggttgcgtaccgcctcgtgcccgagcaacatgccgaggccgtgctcggcgttgtcctcgaacagcgagttcgaccaagccgggccgcgcccatccttgttcaccgcgtaaggagacgtggcagccgggccgccccagatggacgagcagccggtggcgttcgtgatgtacatgcgctcgccgaacagctgggtgacgagcttggcgtacgccgtctcggcgcagccggcgcaggcgccggagaactcgagcagcggctgcttgaactggctgcccttgacgctggcgtcctccagctcgggcttgtcggacacgttggccacacagtagtcgaacacgtcctgctgggcgagctcgtcttcctgcggcaccatggacagcgagtcggacgggcacacgttcacgcacacgccgcagcccatgcagtcaagcggcgacacggccagcgtgtactgcaggccggcagcggctttgcccttcgccggcacgagggtggtcgccgccggcgccgccgcagcttcctcctcggtgagggcgaacgggcggatggtggcatgcgggcagacgaacgcgcactggttgcactggatgcaggtggcggcatcccaagcgggaacgctcacggccacgccgcgcttctcgtacgccgcagcgccctgctcgaactggccgtccacgtgcggaacgaacgcggacacgggcaggcggtcgccgtccatgcggcccaccggctccatgatctcgcggaccatcttcaccacttcggcgcggccctcgagcgcgggggcctcgccctcgtcgacagcctcggcccagctagccggaacctccacctgcacgaacgcggtggcacccgcatcgatggcgcggtggttcatatcgacgacgtcctggcccttcttcatataggacttcgtggccgcatccttcatgtaccggatggcctcgtcctgcgggatgacgttcgccagcgtgaagaacgccgattgcaggatggtgttcgtgcgcttgcccatgccgatctcgcgggcaaggtcgatggcgttgatggtgtagagcttgatgccgttgttggcgatgtagcgcttggcctcggcgttcagatggtgctcgagctcttccggcgtccactggcagttgatcatgaacgtgccgcccggcttcacgtcgttcaccatgcggaagcccttggtgacgtaggacgggttgtggcaggccacgaagtcggccttgttcacataataggtgctgcggatgggagagtcgccgaagcgcaggtggctgatggtcacgccgccggtcttcttcgagtcgtactggaagtaggcctgcacgtacttgtcggtgtggtcgccgatgatcttgatggagttcttgttcgcgcccacggtgccgtcgccgccgaggccccagaacttgcactccaccgtgcccgcggccgccgtgttggggctcgccgggtcctcgggaagcgacaggttagtcacgtcgtccacgatgcccacggtgaactcgcgcgccggggcgtccttctccagctccttgtacacggcgaacaccgaagagggcggggtgtccttcgaggccaggccgtagcggccgcctaccaccgtgaggtcgcctcggccctcgtgcgccagcgcgttcaccacgtccatgtacagcggctcgccgagcgcgcccggctccttcgtgcgatccatgacggcgatcttcttgcacgtggccggcagcgccgccacgaacttctcgctcacgaacgggcggtacaagcgcaccttcaccaggcccaccttctcgccgtgcgcgttcaggtagtcgacgacctcctcgaccacgtcgcagaacgagcccatggccacgatcacgcggtcggcgtccggggcgccgtagtagttgaacagctcgtagttcgtgcccagcttggcgttcacctggtgcatgtagtcctcgaccacggcgggcagcgcatcgtagatgccgttgcatgcctcgcggtgctggaagaacacgtcgccgttctcatggctgccgcgcatggcggggtgctcggggttgagcgcatgctcgcggaaggcgcgcaccgcgtccatgtcgcacatctcggccaggtcgtcgtagttccacacggagatcttctgcacctcgtgggaggtgcggaagccgtcgaagaagttgatgaacggcacgcgccccttgatggcggcgaggtgcgccacggcggacaggtccatgacctcctgcacgttcgtctcggccagcatggcgaagcccgtctggcggcaggccatgacgtcggagtggtcgccgaagatggagagcgcctgagtggccacggtacgggcgctcacatggaacacgcacggcagctgctcggcggccatcttgtacatgttggggatcatgaggagcaagccctgcgaggccgtgtaggtggtggtgagcgcgccggcggccagcgacccatggaccgcgcccgcggcgccgccctcggactgcatctcgcacaccttcaccttcgtgccgaagatgttcttctggccggcggcggaccactggtcaacgaggtcggccatcgggctcgacggggtgatgggatagatgcccgccacctcggtgaacgcgtaggacacgtacgccgcggcgttgttgccgtccatggatttgaattctctcgtcatgctttcctctcctcttaaggggatttcgaccagggccgaacctcgcgcctggagaacacacctcgcctatgataccagtaggggttcgccatcgagcgccgcaggtgcagtggctggcacggcacggtcgcccgcatcggcaagcggtggaaattatggcgaggacgtggagagacgcgggggacggtgtgcaggggacggcgcttgggcaaccctgggctcgcatgaacggcacggcgggccgtccggctcgtgcggatctcgcgccggcctccgcacgtttcccatgggcaaccgagatcaaccagggcgaccatccgagccggcagccagctccttccctagctcctcggcgagcgcgggcaggagcttggccatcgtggcgtcgatggttttcttcttcagctggcattcccagaccacgtgcaccttccagcccagggcctccagggcggtgcggctctgctcgtcgcgctccacgttgcgcgcgaacttcactacccagtactccacgttgctcttgggcagcgagaggttgcagtgcgggcaacggtgccagaagcacccgttgacgaacagggccaccttcttgcccggccaggccacgtcgggatgccccggcaccttccactgcaggcggtagcccgaaagccccgccgcgcgcaggcgggcccgcacgacgagctcgggcctcgtgtcggcgcgcttgttgccccgcatggacttgcgcacgttctcgttcgtggcgggcggggccgccacgcgcaccggggcgggcagcgcgcggccggcgagcagctccacgcgcgcccggaagggcccaacgcccggcccggccgcctcgcagcccgcggaacctgctcgctcgccccggttccccaccccgttacccatctgtttacttacgctcatgcgccgcatgatagcacgtgttttcccagttcatatattttcttcttagaatgataatcccaatattgagtttacaagttctttattttctcggcgttttacaccataataggcaaagctgttgtgcgcgtgcgcaagcacgtgcgtatgctcggggctaggaaggccccgtcaccgaatggagggaaacctatggaacagcctttgaaagcacctttgacccgccgcacgttcctggcgggaggcgccgtcgccgcgacggccgccggactcgcgctcgccggttgcggcggcggcgaggcccccaaggaagagcccaagcaggacgccggcaccgacgcccctgccgagggcggcaccctgacgggcgcgtgcgcctacacgtccacgaacgtgaaccccgtgggcctgaacggcggctccgcgctcatgctggccgccacgtggcacgtgttcgagggcctgtacgacctcgacctgcacacgtacaagacctacaacgcgctcgccgccggcgaccccacgaaggtctccgacaccgagtacgaagtggccctgcgcgacggcgccaagttctccgacggcacggacgtgaccgtggccgacgtggtgaacgcgctcgaggtcaacatggccgacgccacctgcggcgcgttcctgtcgttcatcgactcggtcgccgagaaggacgacaagacggtcaccatcaagctgaagtaccccttcgcgctgttgaaggaccgtctgaccgtggcgaaggtgttccccgcctccctcaccgaggaccagctcaagaccatgcccatcggctccggcccgtggatgtacgagagcgtgaacggcgacgacggcggcaccatcaagttcgtccccaacccgaactacgagggccagtacaagcccacggccgacgccatggagtggaacatcctgctggacggcaccgcccgcacgacggcgctgcaggaggccacggtgcaggtcatggagaacgtgcccgacgccaacgccgaccagctctcgggcgccggcgccaccgtcgagtacgcccagggcttcaaccaggcgttcttcatgttcaacacgctgaaggccccgttcgacgactaccgcgtgcgccaggcgctctactacgccgtggacgtggagaagctcatctccaaccagctcaacggccatgccgccccggtcacgggcttcctgccggaagagcatgccaactaccacaaggccgccacggtctacacgcacgacgtggagaaggccaagagcctgctcgccgaggccggcgttgagaacctggccttcacgctcgtcgtgaacaacaactgggtgaaggacctcgccccgcagatcaaggaagacctcaaggccgccggcgtcgagtgcaccatcgacgagcagaagatcaactggagcgagtacgccgcctccgacacgacgctcgcctacgacgtcatgctcaccccgggcgacccgacctgcttcggcaacgaccccgacctgctcatgagctggtggtacggcgacaacatctggacgcagggccgcacgtgctggagcaaggccgccgacggcaagtgggccgagctgcaggagctcatgcagcaggcgcgcgaggcggattcctccaagcagcaggacctgtggaaccagtgcttcgacctcctggccgagcaggtgccgctgtatccgctgttccaccgtcagatcgccacgggctaccaggagagcatgatctccggcttcaagcccatcgccacgacgggcctcgtgttcctgggcgccagccccaaggcgtaagggaactgctgctcgcgcacgatgcttttcttagggcctgcccatttggtgcaggcccttttttcgggtgtgcgacccacgcggcaacaggccgcacattgtcggccccacctgcgtcccctttctcactttgctccctaattttcacagagaaaccccaaagactcatatagaatagggaaagctgctccacgaggggtcatggtcaccatgcgcgcgagaagggcagctgccaacaagtaacggtaaccgatcagagccaagagcgaaaggagggtgcggtgagcaacctgctgcgtatgatcggacggcgcctcatagcgctgccgatcatgatattcggtgtcaccatcctcgtattcttcgtcatggcgctctcgcctatcgaccaagcgtattcggtcctgggagagaacgcgaccgaggcgcaagtccaacagtatcgcgaggaccacgggctgaacgacccgatcctcgtgcagtacggcaactacatggtgggcctagcccaaggcgacctgggtacctacggcgcgaacaacgcctccgtggccgagcgcatcggccaggcgctgccagtcacactccagctgacgttcttcggcctcatcatcggcgtggtggtggcggtgatcctgggcgtggtctcggcgctgtaccgtgaccgatggcccgaccagatcatccgcgtgttctccatcgcgtgcatcgccaccccgtcgttctggctggcggtgctcatgatcctgctgttctcgtccatgctgcacgtgctgcccgcctcgggccccctgccctccttgttctccgatcccggcggatggctcgcgcgcatggcgctgccggccatcgcgctgggcgtgccggtatcgggccagctcacgcgtgtcattcgcacgtcaatggtggaggagctcgaccgcgactacgtgcgcaccgcgctcggcgccggcatcccgaagagcgtcgtggtggcccgcaacgtgctgcgtaacgcgctcatcaccccggtgacggtgctgggcctgcgcatcggctacctcatcggcggcgccgtggtcatcgaggtcatcttcaacctgcccggcatgggcatggccatcctctcgggcatccagtccagctacacgatgctcgtccagggcgtcgtgctggtggtggccatcacgttcatcatcatcaacatcatcgtggatatgctctatatcctgatcgatccgcgcatcaggacggtgtgacatggttaagctacgagaaaacactaccgcaaagctcgagtccaaccccggcaaggtgcacttccgccgctggaaggccatgtccatcgggtcgcgcatctcgctcatcgtgctggtcctcatcgtcatgatcgccgtgctggccaacatcctcgcgccgcacgacccgtacgccatcttcaccgcccgccaagcgcccgacgcgcagttcctgttcggcaccgacgacaagggccgcgacgtgctgtcgcgcatgatgtacggcgcgcgctactcgctcatcatcggcctgggcgccacggcgttcgcgctcatctgcggctccatcatcggcgctatcgccgccgtgtcacgcaagtgggtgtcggaagtcatcatgcgcgtcctcgacgtggtcatgtccttccccggcatcgccctggccgccacgttcgtcatcgcgttcggcagctcggtgccctcgctcatcttcgccatcggcttcctgtacattccgcagatcgcgcgtatcgtgcgtgccaacgtggtgagcgagtacaaccaggattacgtgcgcgccgtcgtcgtctccggcgcacgggcgccgtggatcctcgtgaagcacgtcatccgcaactgcatcgccccggtcatggtgttcaccatcgtgctggtggccgacgccatcgtgttcgaggcatccctgtccttcatctcggccggcatccctgagcccacgcccacgtggggcaacattttgtccgacgcgcgcggcggcgtgctggcgggccgctggtggcaggcgctgttcccgggcctggccatcatgatcacggtgctctgcctgaacatcctgtccgagggcatcaccgacgccatggccgcggcccccaaggccccggtcaaggccgccgacgacgcgctcgccgcgaaccgcgaggccgacaagatggtggccgacccgacgctggcctacgccgcccaggccgagatgctggagaagcgcctggcccagctgcaagccgtggagaagacgcgcaccgaccgcttcgaggcgcgcacggacgtgccgcccatcctggaggtcaaggacctctgcatcaagttcccgcgccatggcgacgtgaacgtggtagaccatgtgagcttcgtggtgcgcccgcgccagaccatgggcctcgtgggcgagtcgggctgcggcaagtccatcacctcgctcaccatcatgggccttttggacccgaaggccaccgtcaccggcgaggtgctctacgacgggcagaacctgctcgccatgagccaacgtcagatgaacgcgctgcgcggccgcgagatcgccatgatctaccaggacgcgctgtcgtccttgaacccctccatgctcatcaagtcgcagatgaagcagctgacgaagcgcggcggcacccgcagcgccgaggagctgctggagctggtgggcctggatccgaagcgcacgcttggctcctacccccacgagctctccggcgggcagcgccagcgcgtgctcatcgccatggcgctgacgcgcgacccgaagctcatcattgccgacgagcctaccaccgccctcgacgtgacggtgcagaagcaggtcatcgacctgctgaacaagctgcagaaggagctgggcttcgcgatggtgttcgtgagccacgacttggccctcgtggccgaggtggccaactccatcactgtcatgtacgccggccaggtggtggagcagggcccggtcacggacatactgtgccaccccgtgcacgagtacacgcgcggcctgctggggtcggtgctgtccatcgaggccggcggcgcccgcctgcaccaggtgccgggctccgtgccctcgccgaaggacttccccgagggcgaccgcttcacgccgcgctcgagccatcccgacaaggtctcgcagctgcgccccgtgctcaagcgcgtggagggcaccgaccactactacggcgagctgcctgacagcgagctgaaacgactcggtatcaagccctatgtgccaggaggtccgctgatatgagcgatgagaaactgaacgggacgtccaccgcgcctgcgggcgcggacggcgagcccacccccatcatcttcctcgatgacatccgcgtgacgttcaagacgcgcaccggctacatcctgcacccgaacaaggtgcaggccgtgcgcgggctcacgctcaaactcatgccgggacagacgctgggcatcgtgggcgaatcgggctgcggcaagtccacgacggccaacgtcatgtgcggcttgcagcagcccacgtcgggcagggtgttcttcaagggcaaggacgtgacgaagcgcaccgccgccgagcgccgcctcatcggccgcgtgatctcggtggtgttccaggacccggccacggccctgaacgcccgcatgagcgtgcacgaccagctcatggacccgctcgtggtgcacaagatcggcgacaaggcctcgcgcgaggcacgcgtgcaggaactcatcgagatggtgggcctgccgggatcggtgctcgacgcgctaccggggcagctttccggcggccagcggcagcgcgtggccatcgcccgcgccctgtcgctcaagcccgacgccatcatcgccgacgagcccacgagcgcgctggacgtgtcggtgcgcgcacagatcctgaacctgctgatggacctgaagcgcgacctgggcctgtcgatggtgttcatcagccacgacatacagacggtgcgctacatatcggatcgcatcatcgtcatgaacgccggcgtggccgtggagaacggcacggcggaggaggtgttctcgaaccctaaggacgagtacacgaagctgcttttgggcgcagcgccctcgctgctgcatcccgaactgggcaagtaggcccgaatccggcgcattcggcggatcgcggcccccggagagatccgggggccgcgttgtatcgctagccatgcacgccgatccgggcgcttttcttgtggtcgccccttaccgtgcgttgacggcgaccatcaggggaattaaagttctatcgtttagattcgaacaacggaaaagaggattagctcccatgactgactcaccgtttcgcggcgtgatcccaccggtcgtcataccgctgaccgagaagcgccaactcgacctcgaggcactcgagcgctccatcaaccgcatgatcgatgccggcgtggacggcctgttcttcctcggctcctcgggcgaggtggccttcctcaccgatgcgcagcgctatcacgtgctgcaggaggccgtggccatggtacatggccgcgtgccggtgctggcaggcatcatcgacatggagacgttgcgcgtggtcgaccaggccaagcgcgcgtccggctacggcgtggacgcactcgtggccaccgcccccttctacgccctcggcggcccgaaagaggtggaacgtcacttccgcgccatccgcgaacacaccgacctgccactgttcgcctacgacctgcccgtgtgcgtgcacacgaagctcgaccccacgatgctcgtgcgcctgggcaaggacggcgtgctgcagggcgtgaaggactcctcgggggacgacgtgtcgttccgctggctgctgctggagaacgaggatgcggggcacccgctgcagctgctcaccggccacgaggtatgcgtggacggcgcatacctcgcaggtgcggacggcgccgtgccgggactcgcgaacctcgacccggcgagctacgtggagcagtggcgcgcggcgcaggccggcgactgggagcgcgtgcgcgacatccagaatcatctggcccgccttatgttcgtgacgcgcgaggtgaaggccaccgtgggcttcggcgccggcgtgggcgcgttcaagacggcgctgtggcagatgggcgtgttcaatacgaaccagatgcgcgagcccgtgtgcgcgctcgagggcgaggacgtggagcacatcgtgaccgtgctcaagcaggccggcctcatggacgccgacgcacccacgcgcgagtccacctggagcgcctgccccgtcttcggctgttcgaagtaaggaggggcctgtgactgacgacacccttcagaagctaaccgccacgcgcgactggtgccgctccgagctggacgcctgcgtggacttctggctcgcgcacggcatggaccgcgagaacggcggcgtgtacacctgcctcgaccgcacgggcgaggtgtactccaccgacaagagcgtgtggatgcaggggcgctgcgcctggacgttcgcgcacctgtgccgcctgtacggcgagcgccccgaatggatggaggccgcgaagagctgcctggacttcctggaggagcactgcatcaaccgcgaggcgggcggccgcctgtacttcacggtgacggccgagggcaagcccctgcgccagaggcgctactgcttctcggagggcttctacgccatcgcgaacgccgagtactacgggctcacgggcgaggttgagcatctggagcgcgcgcgccgggcgtacgagatgatccacaacctgaacaacggcctgatcgaggacccgacagggctcgggcccaagaccatcgcggaaacgcgctcgggctacgcgctgggcgacccgatgatcttcctgaacatcatcggcatcatgcgacgcgtggacccggcgaacgcggaggagtacgaccggcacgcgcgcgagtgcaccgaccgcatcgtgaactggcactaccgaccggagctgggatgcacgctggagagcgtgaacgcgcagggagagccggagctcgagtacacggccggacgcgtggtgaacccgggccacgacatagagtgcagctggttcatgatggacgaggccaactaccgcggcgacaaggagctgcaccgcacggccgagcagatcttccgtctggccatcgaggccggatgggacgacgagtacgacggcctgctgtacttcatcgacgcgctgggcaagccgacggaagcctacgagcacgacatgaagctgtggtggccccacaacgagatcatgatcgccgcgtcgaaggcgtaccgcgacaccggtgacgagtactacctggattggctgctgcgcacggtggactactgcaaggagcacttcgccgaccccgagttcggcgaatggtacggctacctgcgccgcgacggtctgcccaccatgccccccacgaagggctccacgttcaagggccccttccacgtgccccgcgccctgtccatgaccgaacgagtgctgaccgagctgataggagactgacgacatgaactacctgggtatcgattacgacgtcaagaacatgcccgtcctggacgagggcttcatccccttcggcgtgtggatgaaggcgtacctcgagggcgccacccagcccatcgccgtggccgttgagcgcgaggacggcttgatctcggtgcgcgagagcttcatccgcggcggcgagttcgccgaggccgacttccgctacgtggagcgcctggtgaagttcgagctgtggagcatcggcggcttccgggtgtacctgcgcggctgcgatgacatcgcggcgaagctggccgaggcgtactcgccggagggcgcacgttcgttcgactacggcttcgtgggcgacgtgtacgagaagccgctcgaggtcgtggcgtgcacggaggccgacttccccgccgccaacgaggccgccaagaagatcggcggccacctgaagggctgccgcatcggcttcgacgccggcgggtcggaccgcaaggtgtcggccgtcatcgacggcgagtcggtgtactccgaggaggtcgtttggttcccgaaggtcaccgaggatccggagtaccacttcaacgagatcgtgaccgcgttcaagaccgccgcctccaagatgccgcgcgtggacgccatcggcgtgtcgtcggccggcacgttcgtgggcaacagccccatggtggcctccctgttcatcaaggtgccgcgcgatcgccgcgaagaggtgaagagcatctacgaccgcgccggcttggagatcggcgacgtgccgctggtggtggccaacgacggcgacgtgaccgcgctcgcgggcttcatgagcacgggcaagggcgacatcctcggcatcgccatgggcacgagcgaggccgtgggctacgtgaacgacgagggcaacgtgctcggttggatcaacgagctggcgttcgcgccggtggacctgtcgcccgaggccatgcaggacgagtggtccggcgacttcggcgtaggctgcaagtacttcagccaggacgccgtcatcaagctggcgccggccgcaggtatcgagctggacccggagctctcccccgccgagaagctcaaggtggtgcagggcctggccaacgagggccacgagggcgcgctcgacatcttccgctccatcggcgtgtacctggcgcacacgctcgtgctgtacagctcgttctacgagatcaagacgctcctggtgctgggccgcgtggcctccggcgtgggcggcgacctcgtgatcagcgagtgcaaccgcgtgttggccgaggaataccccgagctcgacgcgcagatcaacgtgacgctgcccgacgagatgatgcgccgcgtgggccagtccgtggccgccgcctcgctgccggaggcgtaaaacggcgcaaggggcattcccccttcatcgtttagacgaggcccgcgccgcatggcgcgggcttttttccggcctcttccgatctcgttcaagggccttgacgccgaaagagccggttgctgccaaaaacggggcggtttggcaatcgtagcgcgccgcatgagacagattctgcgatagaacagcagtccgggacggtgttttcccaggtagcgttctgtgatgataatccgagcgaataaccatggattgccaaaccgacttgtttttgacactgagggcccgtttcggcgtcagcaatgccagccttcgtaacgcttcaggcggccgctgccccgatgcccgccccgcatgcaggcatcggggcaatcccccacttaggcaaagcgccctccgcgatcgctcgcagcggggcgcttctagcggcatccgatggtgcgctacgccagcagctcgccgcgcaggacgacggcgcgcacgtcgagcgtctccttgtccagcagcacggcgtcggccaccttgcccgcctcgatggcgccgcgctcggcgtccaggccgagggcgcgcgccgggttcgcgctcgccgccttcacggcgctcgccagcgggatgcccatgtcgcgcacggcaacggtcaggcagcgcatgaggtcgctcaccgagccggcgagcgcgccgttgtcgatggtggccacggggccgcgcaccgtgacgtcctggccgcccaggtcgtaggtgccgtcctcgaggccggccgcgcgcagcgtgtcgctgatgaggatcatgcggttgtcgccgaacagctggaaggccaggcgcaccatggcgggatggatgtgcacgccgtcggcgatgatctcggccgtcacctcgccgtgctcgacggcggccgggatggggccgggcttgcggtggtgcatggggtccatggcgttgtacaggtgcgtgagctggcgcgcgcccagctcgaacgcgcgggcggccgtgtcgtagtccgtgcaggtatgcgcgagcgaaatgcgtacctcgttcgccatctcgcggatgaactcctcggcacccggctcctcgggcgcgatgtccacgagcttgaacaggccgccggccgcctcctgcaggcggcggaactcctcggccgaggggttgcgcacgtagtcggggttctgcgcgcccaccttgctcggcgagatgaaggggccctccatgttgatgcccacgagcgccgcctcgtccgcagccggctcgtaggccgccgcagcctgcgcggcgcgcatgagcacgtcctcgggcagcgtcatcgtggccgggcacatggccgtgacgccgcgcgaggcctcgtaggcgcccatcctgtgcaggcccgccaggtcgccgtcgctgatgtcggcgccggcgctaccgtggaaatgcaggtccaccaaaccggggatcacgtagcagccggccgcgtcgacggtctggccgccttccgctcgcgcggcctcccccacgaagcggccttccgccacgaacacgtcgcgctcgacaaacccctcgccaacgaacacgcttccgttgatgatgcgcatagggcattctccttccgaactgcctcaagcaggtgattttagcagggacattatactgccccatcggccatttttcgtcctctgctccgagaaggttgcctccgattcgccccttcttcgcaaattcgaggttcgaattgcacggaaatcgccgctctgaagctctggaggagcctgcaaggcccttttgcgccgtccggcatcgccatccgatacggtttgcccagttcgtggaatacgatgctcgtccatgccggctccgtgagcttcagagcggcgatttccgtgcatccaaggggcgatattttcgaagcgcacctttgattcgctcgcagcgagagggagccgcacgatgcggccccctctcgctgcgacagccgctgcgccgatcctcccccggcacagcggcttctttgcgcgctttacgccaaatcgcggcagagctcgccggcggcggggtccacgatgacggtggcgttgggatggaactgcaggatggaggccggcacctgcggagtgaccgggccgaagaacgccttcttcacgatctcggccttgtgggagccttccaccaccacaaggacgctgcgcgcggccatgatggtgccgatgcccatggtgtaggcctgacgcggcacgtcgtcgatgctgtcgaacaggcggctgttggcctggatggtgctctcggtgaggtcgacgcagtgggtggccttggggaacgtgtcctccggctcgttgaagccgatgtggccgttcggcccgaggcccagcagctgcaggtcgatgccgcccgcctcttcgatggcctcctcgtaggctgcgcacacggcatcggcgtccggattgaacccttccggcacgtgcgtacgagcctggtcgatgtccacatggtcgaacaggtgcttcttcatgaagtagcggtagctctggtcgtgctcggggttgaggccgcggtactcgtccaggttgaacgtggtcacgtcggcgaagctgatcttgccggccgcgcagtcctccacgaggcacgcgtacaggccgatgggcgtcgtgcccgtggccagccccagcacgcaggacgggtcggcgtcgacgtacgaggcgatgcggtcggccgcctggcggctcatgtcctcggtgctctcggcgatgatgaattccatggaaccctctcttcccttgcgtttattgctttctatgccgcgcatgccgcaacggcggcgcggcgcctccctcggccccggtcggagccggaggggttggtgcctaggtccagaactgagccgtctcgataacgtcctggtacgcccacgagtacacatcggaataccagcccgtttcgggcacgaagcatacgagcacgctgtagaccaccgaaacggccaccagcaccagcagcaccttcatgagcaggttctgcgccatcgtcccaggcgacaggttctcgttcacgatgaacgccagcagcacgacggccgctaggaacatgaagctgaagtcggcgaagtagcgctgcaggatgccggccatctgcgcgtccaagagcgccacgatgacgcccgacgccagcagcaccacgatgacgcccatgatggtgcgcgtggagcgctggcgcatgcgcagcgcgaggatgcgcttcgcgaacggcagcacccacagcaccggcaggcacgccaggatgccgccgaacgtgacctccttgatggtctgccccatgtaagtggtgtcgaacggagccggctgcacgtacgggaacacgcccgtcacgcacggaggctgcagaaagtacgcgaacagcgccggcgcgaggcggcccaggttccaaccgcgcttcgtcatgtcgttcaccgtgaggttgtagttcgccccgaaatccgtgagcgagccgaagcgggcgtagttgtagcccatgaggccggccgccaccaccgcatagggagccacgaggcaggcgaactcgcgtccgccgcgcggcgtgaacagccggcgctccgtgatgtaggggcgccagaacagcgggaaggccagcagcgacagcaccacgagctgcgggcggcagcccaccacgagcgccatgcacagcgaccctgccaggtaccacttctccggcccggtggaacgcgctgccgacgcgcggccgcgcatccagaaatacagcccccacacggagaacgccagccccagcatgatgggcagcgagtagaacgtggggaacttcagcaggtacaggatgccgcagcaggtgacgagcggtatctgcagcagcaggtacaggcccaggctcacccgcttgaagtgatagcgcgcgaagcggtcgagcaacgccgagcagcccagcacgaaggcgacgcacgcaatgagcacgccgatagccgtggggaagttagcgccggtgagcaagtagaacggcaggtagaacaacacgaccggcaccacgccgaagtagacgtagtagtgcccgtcatggtaggccacgtcgaacaggtacggctcccccgtctccttctgcgcctcgtcgcgcgcgcccttgtcgtaggggtcggccatgtcctgcagccactggggcggctcctcctcgaggtagagctggccgtgcgccatggccttggcaagctcggcatactgctgggcgttgtcgccgcccacctcgaaggtattcacgatgctgtgcccgtcccacgagccgctgttgtagccctgcgtggcgacgcccacaaggttcgagcccatgaacaggaacgcggacatgaggtacacctcgatgaccaccgtggcgatgatggccgccttcgacttgcgcggctcgtccacgatgtggatgcggtagatggccgagcgcgggcggaacgcgaacgccaagagcagaatgccggccgtggccaggaagcgccccgtgttgaagtcgaacggatggtgcgcgttcagcacgatgtccgagagcttgatgggatagctcacgttctcgcccgtgacctcgatcctcaggttgtccacgagccccgccgtgttcaggttgatgtactcgctctggtcggacagggtggacaccgccacgtcgggcacgcccaccgtgtactccgtggagtcgaagtacgtgtggtgagcgtcgtcggtgaactggatcttcaccgtgagctcctgggcgggctggcggtagtcgaagttgagccagatattgtgcacctcggtgttgaggttcgagaactccagcgtgtggttcacggccgtgagcttgtactgctcgtcggtcgtctcctgcaggttgagcttgtcgttcaggctgatggaattgtagccggcagacgtgaagtagttcaggttgaacaggaacgtctccagcaggagcgccacggcgaggatggcgaggatgctcttcgccagatgcctgaccgccggccgatgcgcgcgcatgaagcccgtgtaggcgtaggatatgttctggcggacagtgggcatactggtaacgaattatagatgaaaaaaggcggacagggcagctcaagccctgtccgccttcaagattgcgcgcaaaacgccgcgttcggcgcctacaggcccagcgccttcttcacgtcggcgtacaccacgttcgggtcgcggtcgccgtcgatggagacgagcaggtcgcagccgcggtagtagtcgatgagcggcgccgtggacttctcgtacacgtcgaggcggttacgcaccgtggcctcgttgtcgtcgtcgcgctggtacatctcgccaccgcacttggggcaggtctcgtcggcggcggtgccgatgtagttgcagtcgcggcacatgcggcgcgacgtgaggcgcttgacgatgacctcggggtccacgtccacgagcagcgccgcgtccagcgggcggcccagcttggagagctccgcgtcaagcgcgacagcctgggcggacgtgcgcgggaagccgtcgaggatgaagcccttctcggtgtccgcgtcctgcaggcgctcggtcaccaggccgatgatgacgtcgtcgggcacgagctcgccggcgtccatgtaggacttggccttcttgcccagcggcgtgccggctttgacggccgcgcgcagcatgtcccccgtcgagatgtgcggcgtggcgaactcttcaaccagcttggccgcctgcgtgcccttcccggcacccggcgcccccaacaacacgatgttcatgagtgatttcctttcgacataccatcgatgccccgtattgtagcaaacggcgaagcgcgccgatcatatttcaaaagaaagacggaggacggggacggcagggagacggcgaaatcgcacacttgcaggatataccgcaagttggacgcgaactcccgcgaggagttgctcacccttgtggaaaatgcctcggcatgcgaagacgccgactagggcgatgcgaagcgagccaggctacccgccgtcgcgcttctccagcagctcccgcctcgagttgacccccgccttctggtagatatggtacgtgtgggacttcaccgtatggggcgacagaaacaacttctcagcgacggcattcgtatcgtagccctgcattagcagcacaagcacctcggtctctcgccgcgacaggccgaactcctcggccatggccttgctcttggcgacgccgccgtctacgccgcctgcctccctctctgcacgcgccgatgccatacccggatcgtggggcatgacatcgatcttgccgctggccgccaccatgacgaacagcagcacggccaagaaaaacggcatgacgaaagcgtagtcgcgcgacaagtcgaggaagttcacgaggactaggttgacggcacctgccgccaccatgccgcactgaatgtatatcctgcctcgggcgatgctcttgatgggcgtgaggcgcagccgatccgtcagatcgaacaagaagcagaacgtggacgcgtcgaacgcggtgagcaacatgagcagcagcaggtacataacccatttcatggttcccgacgcaccggtgagcaccataaggataactgccacggcaggtagcagcacggtaatgaacgtctcgaacgcaatggcgcgcttcgtgtgcacctcgaagagcagcaggccgcccacgcctgcggcaagcgctaagcccgtcagggggtaactcacgtacactggcagatcaggcgccatgcaagcatagatgcccacgccgaacacggccccgtagatgacaaggacaacgttgctctttctgagcgagcgtgcgacatcctttgtcacaggtcgatcgcccaacgcatggctcggccagaattgatgcgtgaacacatagcaaacaagcgagaggaacgccagcagcagcgtaacgaacataccggcggaagaggccaccagcgtagtgagcaagaacagcatcgccccaatgacgatggataggtacaggtagcgccggacactcttgcggtccagatacatgaacgcctcggcccacaggatatggaaggcaccctgccacatacccgccgccagcatggcgatcgcgcatggccaaccgcccaagccgagcgcttcgcccaaggcgctcaccaccaccatggccgcaagcgcaatataagcggcgacggcgagcgggatgcggaatcgcgtggagcagaagcgtccgaacagcgcatagagcgccatctcgaatacgacgatgcccccaaggtaaccgatgcggcccacatcgcgctgcaaggacgagaacgcgtcaagcggcgtgaacacgaagctgtaggcgatgatgtacatgacggcccagcaaaggccaaaccccaccacgacgaatggtgcgaactggccgtacgagacctcggtcacgcgcgcttgtgctttctccgacatgacacgccccctttcggcgccgacatgcccgcccgaagcgttcggcatgccgctgcgcccagtgtacccgcccattatatggggcacggcgctcgaagaccgcagaataagtgtctcccggagccaacgcagcacccataggctttaccacctgccattacatcggagtatgaattttctcataccgacaccgacacctagggggaaacgtatgaaacgcgcattcaatccaatcgagcgaagatgcgcactccggacgagcctagaatcgccctgtcccgcgaatgacgaaagcgggacagggcgagtgaaagaagcgagcggaaggaacagcatgagcgagaacaagtaccatctcgtagagcacgagaagccgttcaagtacgatgaggacggcctgcacgtcacgcgcggcagcgcctggtcgggccccggctgccatatcggctgcggcgtgctgctgtacaccgacgacgaggggaagctcgtcaaggtggagggcgacccggagaacccctacaaccaaggcaggctctgcaaccgctgcctggcgctgaccgaggtggtgtacaaccccgaccgcgtcaccacgcccatgaggcgcgatcctgcgcaccgcggtcaggacaagtgggtggacatcacctgggacgaggcactcgacctcgtgtacgagaagttcaccgagatcaaggagaactacggcgcctggtccatcccgttcgtgcagggcacggggcgcgacatagctgcctggatcacgcgcctggcctggtcgttcggcagcccaaactatatgttcaacatgtcgggcatggcctgttacctaccgcgcgtggccggctgcgccgccacgacgggcaacttctgggtgggcgacttctcccagcagttccccgaccgctatgacgatcccgcctgggtccccgccgagtacatcatggtatggggcaacaacccgctcgtcgcgaactcggacggcttctacggtcattggatggtcgacgttatgaagcgcggctcgaagctgatcgtggtggacccgcgcttgacgtggctcgcctcgaaggccgagtggtggctgcaggtgcggccgggaacggacgcggccctcgccctcggcatgctgaacgtcatcatctccgaggacctctacgaccacgatttcgtggaccgctggtgctatggcttcgacgagctggcccagaccgcggcggcctaccccgttggcaaggtggccgagatcacctgggtgcccgccgagaagatcgtcggcgcggcccgcgcatgggcgggtgccgagaacggcatcgtgcaatggggcctggccgtggacaccacaaaggagtcgctaccggcggcccaggccatcggggcgctgtggcaggtatgcggcttctgcgagaaaccgggctgcatgatcgtaccgcccgagatcctggcctactccggcgggttcggcggcgagctggtcacgcccgagatggatgcgcaccgcatcggactggacaagtactccctgctgaagttcggcttccaggtggcgtcctccgacgaggtgatgaaaacgctcgagaccaaagagccctacaagctgcacggcgcctggctgcaaacgacgaacttcctcacctgcacctcccccgaccccgaacgctccatgagggcctggcgcacgctcgacttcatcgtggtggtggatatgttcatgacgcccacggccatggcgttggccgacgtgttcctgccagcctgcacctatgccgagcgcgacggcatccgcgtgggcgacggcgcgcagcgcggcgagaccatcaacaaggtgtgccaggtgggcgcatgcaaatcggacatgcagatcaacctggaactgggaaagcgcttcaaccccgaggcgtggccgtggaaggacgacaaggagatgttcagctccgtcatcgcctgcacgggctatacgttcgaggagctgcagcaggtggcgcccgcctacatccccttcgagtacggccgccacgagaagggcctgctgcgccccgacggccaacccggcttcaacacgcagacgggacgcatcgagctgtggtcgacgttctaccacaatgcgggcttgagccccgtgccctacttcgaggagccaaccgagagcccggccgcgacacccgacttgtacgacgagtacccgttcgtgctcaccaccggcgcgcgcaactggttcatgttccactccgagcatcggcaggtcccgcacctgcgagccggccgcccctggcccctcgtgcagatcaaccccaaggccgcggagcgcatcggcgtgcacgacggcgagtgggtatggctggagaacgagcgcggtcgctgcaagcgcgtcgtggagtgcacgaacatcatggacgagcgcgtggttatgtccgatcacggctggtggttccccgaggctcccggcgaggagaaggacgggctgttcggcatgctcgatctgaacgtcaacaagcttctgaattcgtacgttcccggcaaatccgggttcggcgccaactacaagtccatgctctgcaaaatctatcccgcaaaggacggtgaataatcatgacggaatacggcatgctcatcgactacgaatggtgcaccggctgccatagctgcgagacagcctgtcagatggagcaccacctgcccgtcggccagttcggcatcaagctgaacgagatcggccccttcgagtacgcccccgaccgctggcagctgtcctacgtgccggtgcccaccgacctgtgcgacttctgcgccgagcggcaggcgaagggcaagctgcctacctgccagcaccactgccaggcacagtgtctggaagtcggtcctatcgatgagttggccaagaagatcgcatcgaagaagaaactcgtgttgttcaacatctaacatgggacggccgcgccgccgtgcggacacgacagcatgtacggcggcgccccttagaaggaggaagcgatggacaaagtgaagggatgggcactcgcattcgccgtcggcggcctgtatgccgttattggacagattatctggaacatattcgccggcgccctaggagccgattttccctatctcggacctctcacgctgctggggatgggcgcggtagccctcgtgctgtaccttcccggcatccagcagaggataggcgctgtgagcggtttcggctcgatcctgccgttcaacgggttcgcaggcggcgtggcaggcgcctacgaaagggccgttgccgaaaccggacagccaggtaaaggcgtggcggcgtctgtaaagctcgttctgctcgtcatcggtgtcggcggcctcgtcgacgcaatcgtgggcgcattggcgttcctcgtggcataggaggcaccgcaatggaattcatcatggctttcctagtgggcggaacgctctgccttctgtttcaaatcgtcgcggacgccacgaaagcgcccgttcccctcatcttgctcgtcggtttggcccttggaggcatcctgacgcccttcggcatcatggatcaactcgcagagtggggcggcgccggcttcaccatcatggtggtgggcgccgggcaggccgtttgcgccacgacgcaggcagctctcgccggcaacccctggccgctgctgtccgtcatcggcgtgttcttagccctcacggccatcggattggtctgcggaagcggatactgcgcactccacaagcaggacgacaacgcacatggggacgatgcggccgaaaagcaagctacgatcgctcgccaatgacggcccatccatcccctggcgggcacctcgcgcaggcgtccgcatccgcagaacccccgacaaggagatgaagccatgtcatgtggatacgcctgcgtaagctgcggacgctgccggggaaagccccggaagttgaacatcactactgtgtgcttccgttgcgggcacaagaaccccgaaggcgcggcacgatgcgagaattgcggcctcgaacttccgcgtccaccgaaaccgtccatccccatcgtcgcggcccagccggaatagcagtaccgccgggaactgacagaagggcccggattgttcgggcccttctcttcgccaatccataattgcaacccgcagcgagcgagtgagggcctcatcctgctgctgtccatcccgaaggatatcgcgattccgccaacctcgtgtcagccggcaggaaccgtctttgccagcgcacccgaaggcgcgaagcgccctgcatcctcccgggcgagcgccttacagccccccccccgcctccgaaaaccagcatcggcggcccgagggccgccgatgcgcagttcgccgttctttcgatgcttccctacttgaagaacccgtcgtagttgtgcatcttcagctggctctccaccttgctcatggtgtcgagggccacgccgatcatgatgaggatcgaggtgccgccgaacgcctggatgagcgtgttgccggtgaagaagaacacgatggacggcacgaccgcgatggcggcgatgaagatgccgccgggaagcgtcacgcggtgcagcacgttcttgatgtaggtgacggtggccgtgcccgggcgcacgccggggatgaagccgccctgcttgcgcaggttgtcggccgtgtcctcggggttgaacaccatggaggtgtagaagtacgcgaagaacacgatcaagagcaccgtgaggatccagttgatccagcccgtcgacatcgcgttggccacgttcgtgagccactctatgttgaagagcgccgccagctgcgcggggaagtagatcaggcagctcgcgaagatgatggggatgacgcccgccgcgttcaccttcagggggatgtacgtggactggccgcccatcatcttgcgcccttgcacgcgcttggcgtagttcacggggatgcgacgctgcgcgcgctccacgaagatgatcgcggggatgcacgccagcaccacgaggatgatgagtgccgtgatggcaatgcccatgcccaaatccgccgtcaggttcaccgacgagaagatggcgctcggcacgcgcgacacgatgctcacgaagatgatgagcgacatgccgttgccgatgccgcgctgcgtgatgagctcgcccatccacatgatgaacgcggtgcccgccacgagcgtgaacacgacgatgatgtcggtgagcagctcgggaacctccgtgctgaacaccacgccgtacgccgacgacttgaacaggaacaggtagcccaccgcgttgatgaggccgagtcccagcgtcaggtagcgcgtaacctgcgtgatcttcttgcgccccgcatcgccctccttcgcccagcggcccacggcggggatgacaccctgcatgagctgcatgatgatagaggccgtgatgtagggcatgatgcccagcgagaacaccgagaagttcgacagcgcgccgcccgtgaacaggtcgagcatcgtcatggacacgcccgaatcctggaacgaattcgcgaactcgttgaacgggatgcccggcaccggcacgtacgcgccgaagcggtacagtgcgaggatagccagcgtgaagaggatcttcttacgcagctccggtaccttgaacgcatcgatgatcgagcttagcaaggctcttcgacctttcctccagctgcttcgatcttcgccttggccgaagcagaaaccttatcgaccttgaccgtgagcgccttggtcaggtcgccgtcgccgagcaccttcaccagtgcgtcggcatgcttgatgatgcccttggccttcaggctctcgccgtcgaccacgtcgccggcctcgaacttttcgtcgagacggctcacgttgacgggcaggtactccacatggttgatgttcttgaagccggggagcttcggcagacgacgcgcgagcggggtctggccgccctcgaagccgacgcccttgccgccgccagcgcgggacttctggccgttcatgccgcggccggacgtcttgcccgtgccggaggcaggaccgcggcccacgcgcttgcggttcttggtcgcgccctcggccggcttgagatccttcaattccatggttgtgactccttctcagtcgcaaacgggcccgcggcccgcgctggcagctcgccgccagctaacttccttgggcgtcccgccccttggcggaaacgcgatcacgccgcagaggcggcgatgattcacaatcgaatatgataacacgcgccgcccgaaggcggcgcgtgtaacctcgctggtttacagctcttcgacctgcacgaggtgcttgaccttgaagatcatgccgcgcacgcagtcgttgtccacctggtcgaccgtgcggccgatcttgccgaggccgagcgcacgcagcgtctggccctggtcggctttacggccgacggagctcttcacctgggtgatgcgcagcgtcttcttcgcgtctgccattactccttctccttccagccgtagatcttcgcgacggacgtgtcgcggcgcgcagccacctgctcggggctctccatgttcttgaggccctcggcggccgccttcacgatgttcatggcgttgttcgtgccgagagacttcgtgagcacgtcggtcacgccggcgagctccatgatggcgcgcaccgggccgccggcgataacgccggtaccgggcgtggccggcttgatgagcacgcggccggcgccgtagatgcccatgatctcatgcggcagcgtcttctcgggcgtcagcggcacggtgaacatgttcttcttcgcgtcctcgacgcccttcttgatggcgatgggcacttcctgggacttgcccatgcccacgccgacgcggccgttgccgtcgccgacgaccacgagcgcggtgagcgcgaagcggcggccgcccttgacgaccttggacacgcggttgatgtagacgacgcgctcctggagctcgggaaccccggcgtcgttctgctgcttgttacgagccataagctttaaccccttctagaatttcaggccggcttcgcgagccgcatcggccagagcctgcacgcgcccgtgatacagatgaccgccacggtcgaacacgacctccgtgacgccgttctcctgcgccttcttgccgacgatctcgccgagggcagccgcgccctcgacggtgccgcccttcttgcccgtggccttgaactcggcaccgagcgtggacacgccgcagatggtcttgctggcgacgtcgtcgacgagctggacgtagatgttgttgttgctgcgcgtgacgcacaggcgcggacgcgccgccgtgccggaaaccttgccgcgcacgcggcgatggcggcgagccaacccggcttgtttcttctgaagcttgttcatgattatcccttcgatctcaaaccgtgtagaggctcaaacgttagtcgcccttggcggccttgcccagcttgcgacgcacatgctcgccctcgtagcgaatgcccttgcccttgtagggctccggcttgcgccacttgcggatgttcgccgccacctggccgacctgctccttgctggggccggacacgatgatctcggtttggctcgggacctcgaacgtgatgttctccggcgcctccacgagcacgggatgagagaagccgagctgcatctccaggtccttgcccttgagcgcggcgcggtagccgacgcccacgagctggagcttcttggagaagccgttcgcggtgccctcgaccatgttcgcgatgagcgtgcgcacgaggccgtggaaggccttcgcgtcgcggctgtcgtccggacgctcgacgatgatgtcgtcgccctcgcgcttgatgatcatgatctcggggaagctgcgggtgagctcgcccttcgggcccttgaccgtcacggtgttgccgtcgatggtaacgtcgacgccggcaggaacggtgatgggctgtttgccgatacgagacatatctacctacctccctttcctaccacacgtacgcgatgacctcgccgccaacgccctttttgcgggcgtcgcggtcggtcatcacgccgaggctcgtcgagatgattgcggtgccgagtccgccgagcacccggggcagctcgtccttgcccgcgtagatacgcaggccgggcttcgagatgcgcttgatgccgcggatggtcttggccttcttgtcgccgtacttcagcacgatctccagcgtcgcgcggggctcgccctcgacgacgtcgtagcgctggatatagccctcttcctgcatgatgcgggctatctcgacaagcttcttgctcgacggcatggaaaccgtctgcttgccggcagagtttgcgttacgcacgcgcgtaagcatgtctgcgatggggtcggtcatggtcatggttctgttctcctttggtccgtgatgagccgcgcgcacggttcgtcggcgcccgtaacgcctccgccttctacgcgggcacacccttgaacgtgacttgagtctggcggcttaccacgaagacttggtcacgccgggcagttcgcctttgttggccagctcgcgcaggcacacgcggcacaggccgaacttgcggtagtaagcgcgggggcgtccgcaacgcgtgcagcggttgtgctggcgcgtcgagaacttcggctcgcgcttcgccttggcgatcatcgatttcttagccatgcaattccttctttcctatcctcgacccgcgctcgcgcgcgggtgcaagtaccatcgtgggatcaagcaacctacttgtccttgaaggggaagcccagcgcggagagcagcgcgaaggcgtcctcgttgttgtccgcggtcgtgacgaccgtgatgtccatgccgcgcgtgcggtcgatcttgtcgtagtcgatctccgggaagatcagctgctcggtgatgcccatcgtgtagttgccacggccgtcgaagctcttcggcgagatgccgcggaagtcgcggacgcgcgggagggcggtcgccagcaggcggtccaggaactcccacatgcggtcgccgcgcagcgtgaccttgcagccgatggcctggccctcgcgcaggtggaagccggcgatggacttcttggcgcgcgtgacgcagggctgctggcccgtgatggtgcgcaggtcggccatggcggcgtcgagcagcttcgagtcggaggctgcggcgcccacgcccatgttcacgacgatcttctcgaggcgcgggacctcgttgatgttcttgatgccgagctcctgctcgagcttgggcacgatctcggtcttgtactgttccttcaggcgaggagcggtcatttcgtttcctttcgatgaattaaacgcaggatttccgaccctgcgtccctcgccgccgaagcggcagggccattgtactgcattggccgtcgctggtcgccgaaaagtcagcgagggcggctgtggtgcctcgaattcgcgggatcgcgaaggcgaagcgtacttgggtacgcgagccttcgcgatcgtgcgaaggcggggtgccacagccacccgcagcgtcgacccgttccgccgatcggagatcggcggaactactaatcgatgtccttgccgcacttcttgcagacgcggatcttcttgccgttctcgtcgcgcttcttgcccgtacgcgtgggctgcttgcactcggggcagatgaccatgacgttggacacgtggatgggggcctccatggtggagatgccgccctgcgggttctgctgggtggggcgcatggccttcttgatcatgttgaccttctccaccaccacgcgctccttctgcggaagcgcgcgcagcacgacgccctccttgcccttgtccttgccggacaggaccttgaccttgtcgcccttcttgatgttcataccactcatattacgcacacctcccctacagcgtttccggtgccagagacacgatcttcatgtacttcttgtcgcgcagctcgcgggcaaccggcccgaagatgcgggtgccgcggggcgcgccgtcgttgttgatgagcacggcggcgttctggtcgaacttgatgtagctgccgtcggggcggcggacttccttcttcacgcgcacgacgacgcagcgcacgacctcgcccttcttgacgttgccgttgggcgccgcttccttcacgctgcagatgatcacgtcaccgaggcccgcgtagcggcgcttggagccgccgaggaccttgatgcactgcaccttgcgagcgccggagttgtcggccactgcgagcatggtttgcatctgaatcattgctgtaacctaactttcctcttacgggcatgcatgcgagcacgcaggctatttggccttttccacgatctcgatcagacgccagcgcttcatcttggacagcgggcgcgtctccatgatgcgcacggtgtcgccgacgccggcctcgttgttctcgtcgtgggcgtggaacttcttcgtggtcgtcatcatcttgccgtacacgggatgcggcttgcgctccttgacctgcacgacgcaggtcttgtcgttgacggcgctcaccacggtgccctggcggaccttgcgggagttacgatcttcactcatgtatataaccttccttatccgcgctctaggcgttcagctcgcgggcacgcatctcggtctggatgcgggcgatgtcctttttgacctgacccacgcgggcggtgttgtcgagctggctcgtggccatctggaagcgcagattgaaaagctccgcgcgcgcttctttgagtttcgcctgcaaatcgtcggcagaaagctcacggatctctgctgctttcatttattcctgcccttccgtttccttggaaacaatcttgcacttgatgggcaacttgttgatggcgagacgcagagcttccttggcggtctcctcgtcgacaccgtcgatctcgaacatgatgcggccgggcttgacgacggcgacccatgcctcggggttgcccttgccggaacccatgcgggtttctgccggcttctgcgtgataggcttgtcggggaagatcgtgatccacaccttgccgccacgcttcatgtgacgggtcatggcgatacgggctgcctcgatctgacggttggtgatccagtgcgcctcgagcgcctggatgccccacgtgccgtggttcagccgggtgccgcccttggccttgcccttcatggaaccacgctgcaccttgcggtgcttgacgcgcttaggtacgagcatttacttcgcccccctctcgttgcggtcgttgcgacgggaacggttcggacgggagctgccctcgagcgccgggttcggcgccttctggccggggagcatctcgccgtggtacacccacacctgcacgccgatggagcccatcgtggtggcggcggtgcagaaaccgtagtcgatcttcgcgcgcagcgtgtgcagcggcacgcggccttcgcgataccactcgcggcggctcatctccgcgccgcccaggcggccggagcactggatgcggatgcccttggcaccgctcttgcgggcggactggaccgccttgcgcatggcgcggcggaaggccacgcggccctcgagctgctcggccacggactgcgcgatgagcgcggcatcgagctcggggcgcttgacctcgacgacctcgatggacaccgggccgctggcaaccttctccagcttcttgcgcagggagtcgatctcggcgcccttcttgccgatcacaacgcccgggcgggccgtggtgacgatgaccttgatcttgtcgccggcgcgctcgatctcaaccttggagacggcggcacgggcgaggtacttgtccaggaacttcctgatggccaagtcgttttccaggttcttggcgtagtccttgtcggagtaccaacggctgcgccaatcttcggtgatgccaaggcggaacccggtggggctaactttctgacccatacggcttatgcctcctctcgcggtgcaacgatgatcgtgatgtggctcgtgcgcttgcggatgcgcgacgcggagcccttggcgcgcggacggatgcgcttcagcgtggggccctcgtcgacgaaggccgtcttcacgatgagcgattccggacgcacgtggtgctggtgctcggcgttggccacggcggagttcagcgtcttctcgacggcttccgccacaccgcggttcgtgaacgcgaggatctcgcgggcctggataacggacttgccgcggaccaggtctactacgatgcgcgccttgcggggcgaaacgcggacatagcgtgctacagctttagcttccattgttttcaccccttcttatcgcttgcccttgtcggcggagtgacccttgaacgtgcgggtcggggcgaattcgcccagcttgtggccgaccatggattcggtaacgtagaccggcacgtgcttgcggccatcatgcacggcgatggtgtggcccaccatctccgggaagatggtgctggagcgcgaccaggtcttcacgacgttcttctcgcccgccgcattcatcttctcgatacgatcaagaagccgcggctcaacgaaaggacccttcttcaaacttctactcactattactccttaacgctttgcgctacttcttgcgacggcggatgatcaagcggctcgaagccttcttgggattgcgggtgcgatggcccttcgtggggacgccccacggggtgaccgggtgacgaccagcggacttgttcttgccctcgccgccgccgtgcgggtggtcgaccgggttcatgacggtaccgcggacgctggggcggatgcccttccagcggttgcgtccggccttgccgatcttgatgttggcatgctcggcgttaccgacctcgcccaccgtggcgcggcacgtgatgagcacgcggcgcatctcggaggacggcatgcgcaggatggcgtagttgccctccttgcccatgagctggatgctggtgccggcggaacgcgcgatggcggcgcccttgcccggctgcaactccacggcgtggatgagcgtgccgacggggatgttggccagcggcagcgcgttgcccggcttgatgtcggcctcggggccgctcatgacggtgtcgcccacgcggaggcccttcgggtgcaggatgtagcgcttctcgccgtcgacgtagtgcaaaagggcgatgcgggcgctgcggttcgggtcgtactcgatggtagcgaccttcgcgggcacgccgtccttctggcgcttgaagtcgatgatgcggtagcggcgcttgttgccgccgccctggtgccgcgtcgtgatacggccgttgttgttgcggcccgccttgttcgacagcggcgcaagcagggacttctccggcttgtccgtcgtgatctcggcgaagtccgagaccgtctggaaacgtcggccggggctcgtcggcttgtactgtttgactcccattactgtcctttcttcggatctttgctcgcacgcctctccgtaccccaaagaccccttgtcgcttcgtggactgccgattgccgctgcgccttggggaggcttgacgcacgcgactccggtgtaccacgcgtccgggtgtatctatcaatgaccagacgcaaccgagaattataaacccctccgggtcaggtatcaagtgttgatttgcgtacacaagttgcgcacaagttgcgggggcttttggaggacggtacggggtacgtgaagggggcgccgcagctgtccgtcccgcctggcgccttcggcggaacggggcgggcatgcgaggaatgcacgggaagggcggggcgcgcggggcgcggaatagtcgcgaaagtcgagggcgtcatcggcttttttgcacagtatttaccagttttctacatcgggaacccctaggggagcccttttcggaatcgcggaaacaacgagctggggtaatgctgcccagatccaatcgcaaggtgagcaagcgggtttgcggggaccaaagatgcaataatctggtgaaaagcgtgcggagccggccacgaccggttccgggatgtcgagcgcagcagcgggaatcgcgcttccgtacctatgcttttcaggacgaccgcgccaaaggccgcgcgctagcggcaggtcttgccgccgcctttggcgcgcgaagcgctcgaactgccgctcgggcgcttcggcgagccctttccacctgggcgctgcgcttccttgcgcggccccttggcccctgcagcgtcgcgcgcgcccttggacggcaaggcgacgcgctggccttttccgctccccttgtgcgaagcctcgcccttgcctgcgcccttgccgctccccttgcgcgcaggctctcctttgccgccgcccttgcctctccccttgcgggcgggctcggccttgcccgcggccttgcgcagggtggacgagccggacgccttgccgcgggggcccttggcgggcggggcgccctcggggcgcacgaggcattcgcggccgtggcccaccaggtccatgcggccggccttcttcagggcctccatcacgagggagcggttcttcgggtcgcggtactggataagggcgcgctggagcgccttctcgtgcggggacttcggcacgtagaccggctgcatggtgcgcgggtccacgccggtggcgtacatgaccgtggacatagtggagggcgtggggtagaaatcctgcacctgctcgggcatgtagcccaggtcgcgcacgtactcggccagctccacggcctcgtcgagcgtggagccggggtgcgacgacatgaggtagggcacgaggtactgcttcttccccagctcctcgttcgcctgctcgtacttctgcacgaagcgctcgtacacggcgcggggcggcttgcccatgtgggcgagcacggtgtcggacacgtgctcgggcgccaccttcagctggccgctcacgtggttctcgcagagctcgtagatgaactcgtcgccgtgcttgcggtcggccagcacgtagtcgaagcggatgccggagcgcacgaacaccttcttcacgccgggcagcttctgcagccgctcgagcagcttgaggtagtccacatggtcggcctcgaggcgctcgcacggctcggggaacaggcagcgctggtgcgggcaggcgccggccttcgtctgcttggcgcaggcgggggcgcggaagttcgccgtggggccgcccacgtcgtggatatagcccttgaagccgggctcgtccacgatggcccgcgcctcctccacgagcgagtcgtggctgcgcgcctgcacgatacgcccctgatggaacgtgagcgcgcagaacgagcactcgccgaagcagccgcggctgctggtgaggctgaaccgcacctccttgatggccggcacgccgccggcctcctcgtacatcgggtggtacgtgcgtgcgaacggcaggcggtacacggcgtccatctcggcctgcgagagcggggcggctggagggttctgcacgacgaactcatggtcggaatagggctccaccaggcgctttccaatgaaggggtcgctgttggcgtactgcacggcgaagctgcgcgcgtagttcaggggatcggcctgcagatcggggaacgagggcagctccaccgcgtcgtagacgtgctcgagcgagcttgcgcggtagacggtgccgtcgatgaacgtgaggtcgtcgatggacagccccgcatcgagcgcgtcggctatctccaccaccgagcgctcccccatgccgaagctcacgaggtcggcgccggaatccagcaggatggagcgtttgatcttgtccgaccagtagtcgtagtgcgcgaggcgccgcaggctggcctcgatgccgcccagcacgatgggcgtcttcttgaacgtgcggcggatgaggttgctgtacacgacggccgcgtggttcgggcgcaggcccgcctgcccgcctggcgagtacgcgtcctcgcggcgccgcttccgcgccacggtgtagtggttcaccatggagtccatgttgccggccgacacgaggaacgccagccgcggctcgccgagcgcggccatcgaggccgggtcgttccaatcgggctgcgcgatgacgcccacccggtagccgtgcgactccagaagccgcgtgatgatggccgcgccgaacgaggggtggtcgacgtacgcgtcgcccgacacgtacacgaagtcgacctggtcccagccgcgttccgccatgtcctgacggttcaccgggagaaactgtgcgctcatgggactccttgccggcgcgcgggggcgcgcgtgatcgttggggctaccccgccatcgtagcggaaatacgggccgtccgccacccgcgtaaccccttccccacgacccggtgacgcctccgggccgccggagggggccggcggggaggccgctagactgtatcgattgaaatcgcgaaccgctattgcgcgttcgatcccccgcgaacccgacaacaaggagaaggccatgcacctgcaaacgtacagccaatggcgcgagacgtgcatcgcgctgcatatgacggcccagatgatgggcaaggtgaagctggaatgcctggagccccagccggagtggaaccacgtgctgctggacgcgacgcccgacgggttcaccaccgggttcgtgccgcatggcacgggcgggttcgagatccagctgcgcttggacgagccgcaggtgcaggccgtggcgacaaccggcgaggaggcgtcgttcccgctggaggacggcacgtccgtggcccgctactacgagcggttcacgttgctgctggaggccatcggacacccggcgcccctctacccggtgccgcaggagatgttcacgcaggcgcccttctacacgctcgtcgaaccgctcgcgttcgacggcgaggcggcccggcgctacttcgcgcagtgcctgttcgcccgcaacgcgctgctggacttctcggccggattccgcgggaagaagatccagccgtcgctgttctggggcacattcgacatgacgtgcgttctgttctcgggcaagccgtgcccgtactccggggagggcggcatcgtggagcgcgtggcgttcgacgagcagttcgttgagttcggcttttggccgggcgacgagacggccgacgacccggcgttcttcgtgctggcctaccccttcctcgagggggcgatgcccgaggtctcggtgccgggcgcgtactacgaccccgcgagcgccgagtacttcctcaagctggaggacgtgctgcgcgccgacgacccgcacgccgccgtcgtgcggttctgccacgacgccttcgtgaacgtggccgcagcccagcgctgggagcgcttcgactggctcacgcgcccgctgttggtgtaggacggtgggaagaagtagctcgtgccgaacgcaaacgcgaagagccacggccccgggggcggcacaggctggctctcgcagagcggctgaccgctccagaccggccgcccgcggctgaccgggcggagccgatatgcggcccgtccggaatctcgcgcaggtcaggcgggcgtttcgggcacgagcacgtcgagggcgcagggcacgacgtcgatggcgtactcggaggcctcgaggggctcgccgtcgatctggacgggcgggggcgcgtcgaagcgcaccgacagcgtgcgggctcggcgcagctctatctgccggaagccggtgtgacggccgcctttcgccagcaggaacacgaagacggcgcgcgcgatgccgaagggcgggtgcgcgatgcacacgtccagcaggccgtcgtcgatgcgcgcgtccgggcagatgcggaagcctccgccgtaggtggggcccacctgcaccgcgaaggtgaacgacgcgccgcgcacgggctcgccgccgtcgaacgaggccgtgtagcggtggcagtccaggtggtgcagcagccggtccatgccgctggccaggtagagcgccgtgccggtcctgccggtgcgcgcccgccgctccaccgtgtcgagcgcgatggccgcgtccacgccgaacgagagcgtctccacgaagaacttgccgttgcaccgtcccacgtcggccgggcgggcgcaggctgcgagcagctgcgccacggccgcgtccaccgagcgcgccgacatgccgatcgtgcgcgcgtagtcgtttcccgagcccaccggcacgatgccgaaggccgggcgctcccccgccggcagctgcatgagcccgttggcggcctcgtggatgatgccgtcgccgccgagggcgagcaccgtttcgtacgcgcccgcgcccgctgccaggcgcacggcctcgccggggccgcgcgtgggagccacatcgagcgagccgtcgcccagggcatcccccagcagtgccgccgcacgctcggccgcagcggcgccgttgccgttctgcgccgccggattggcaatgagcagcgtctttcccaaaggggttggcatgggcttcctctcgcgcgtatcgttcccgccgggccggatcccggcggatgccgtcaccgcctattatagggggaaagcacgactgccggcagcagttacttccccagtccgctcacgacggcgcgctggagctcttccaggctggcggcgtcggcggtccactggtgcgcgagcgtgccgagcgcgaggtcgaagccgcacttctcaagcacctcggccacctcgtcagggccgttcttcccccagccgtacgagccgaacgggatgcccacgcggccttcccagcccgacttcggcgagaggcccttcaggtagcagaggaacgccgccacggtgggcatcatgccgttgttgagcgtgggagagcccacggccacgtacctcgccgacagcacctcggtcatgatgtcggagatgtggttcgccttgaggtcgaacaggcgcgcaggcacgccgcactcgatgaacgcctccagtatctcgtgggccatggcctcggtggagtgccacatggagtcgtacaccacgatggcgtactcctcgggggcgagcgagctccaccgcgcgtacgtctccagtatctcgggcacgtggctgcgccagaccacgccgtggctcggcgcgatcatgtcgatgtccaggccgccgagcgcccccagcgcgcgctggacgtggcgcgagtagggcatgacgatgttcgcgtagtacttcttggcctgggccagcacctcgggcaggcccacctcgtcgtcgaagtgcttggaggaggcgtagtgctggccgaacgcgtcgttggagaacaggatgcgatcgacatcggagtacgcggccatgttgtcgggccagtgcaccatgacggtctgggtgaacgtgagcgtgcgcttgccgatgttgagcgtgtcgccggtcttcacgggcacgtagccgcgatcgccgtagtgcgccgcgaggccgttcacgccgtgcggggcgcttgcgtagatgcgcgcgttcggcgcgagctcgcagagggcgggaagcgcgccggagtggtcctgctccacgtggttcgccacgatgttctcgatgtgcgcggggtcaaccacctcgcgcacgcgctcgacgagctcgtcggcgaacgcgggcttgcacgtgtcgatgagcgtgggatgctcgtccatgatgaggtaggcgttgtacgtggacccccgatccgtcgtgtagccgtggaagttccgctcgttccaatcgactcccccgacccagtacacgtccggctttacctcgaccgcatgcagcatgattagctcctttctcgcgttttcgtccagtatagcgacggagcgctgtcggccgaggggtgcgcaggtaaatgatagcgaaagacccgcattcggattgcgcgggaggtgcgggcgtgggctgcgcagggaggcgttgtggggagcgtaggcggggccaagcgaggggcgtgggctatgttttgggaaggcattgcgaagagcaggctgcgcaggggtcacgggctgaacgggggggcagttctcgcgggcgttaccgctgccgaagggccgcgtaacgctgcgcgccggggcggggcggcgggcgggcgcaggcgtaagctgcgcccgtacccgtgggaaaggagccccttatgacgcaaaccgcaatgctcgagacccaggccccgaaggcaggctacgccatggacgacgtgcgcgcgaacgtggatccgaagccgcagatcgaaagtgacgactaccgtcccgccggcaagctggagggcagagccgccctcgtgaccgggggcgacagcggcatcggtgccgctgcggccatcgccttcgccaaggagggagccgatgtggctctcgtctactactcctccgacgacgacgcgcaggcggtggccgagcgcatccgctcgctcggccggcgcgcgctcgtgttcaagggcgacgtgggcgacgaggagttctgccgccgcacggtgggcggcatcgtggacgcctggggccgcctggacgtgctcgtgaacaacgccggcgagcagacgccgcagaagagcatcctcgacatcacgcaggctcagctcgtgcgcacgttccagacgaacatcttcagcatgttcttcctggttaaggccgccctgccgcatatgccgcggggcggggccatcgtgaacaccacgtcggtgacggcctaccagggaagcccccagcttctggactactcggccacgaagggcgccatcacggcgttcacccgctcgctctccgagaacgaggagctggtgggccgcggcatccgcgtgaacgccgtggcgcccggccccatctggacgccgctgaaccccgcgtcctacggcgccgacagcgacaaggtgcgccacttcggcgagagcgtgccgatgggccgccccggccagccctacgagcttgcccccgtctacgtgttcctggcctgcgacgactccagctacatctcggggcaggtcatccatgtgaacggcggcaccgtggtgaacgggtaggcgccgagcgcccgccggccggtcggggtcggcgggcgcgaacgccgaccggggtcaggaagggtacggttgattccgttaatcgtaaaaacagcggagagcgcgaaacggcttcgcccactgcaagcgggaatcatggagtccgacgcagacgctgcaggcttccgcgtggaacacgggcgtcaccttcctctaaaagccgtctgtccgcaggacgggatcgacgttcgccaggaactttagacggaattgtgccgggcagggcgaagacgagacggtacaatacagcagggggttgcgggatgtggccctctcggcgggcgccggggaaaacgaggatgggcgaacgacatgggatggaacgtatcggccgaggtcatcgccttcatcatcgtgctcatcatctccgtgtactcgcgccaaagccatgcggtgccgtcgctgaagaaccgggtgttccggctctgcctgggcacgacgctgggcgccatcggcacgaacctggctttcacgcttctgattgcctacgcgcccctggagctgctgccgctcacgtacctcgtcacccactgctacttcgtgctcacgccgcttttgggcaccgtgtacttctattacgccgtggccgtggtgagcgaggcgcggccggtcgggcgggccttcgcccttgccagcggagtgccgtgcgcggtgtacttcctgctggtgctggcgaacgtgcccaccggatggttgttctccttcgacgcggcgggcgcctacgtgcaggggccgttcatcatcgccacgtacctggtgttctacttctactgcatggcctgcttcgcgctcgtcatgttcacgcgggcgcccatcgaccccgtcatcaagcgcatcctggccgtgttcccgctcatcgccgtggccgtgatcgccgtgcagcagctgttcccaacctatctgctgtcgggatcggcggccgcgtgctcgctgctcatcatctacctgtacttgcagaacaagcgcctgtcggtcgaccagcttaccggcgcctccaaccgccaggagttcctgtccatggtctcgctcatgaacgagaaggagcagccgttcacggccgtgctcgtgtcgctttcgaacttcaagttcatcaacgacaagttcggccacgagagcggcgaccggttcctgcgcgagttcgcctcgtacctgggcgccatcggcgacgcgcggctctaccgctacagcggcgaccagttcgccttcatcgtgagccgcgacggcggttggggcacacatggcggacaagacggggacgacgcgaccgcctccctgctggccccgctgcgacagcgcctcggggagccatggcgcatcggcgggcgctcctacaccgtgggcgccgccatcggggcggtgagctaccccgttatcgcgcgcacgcccggcgacgtggtggccgcgctggaatacgccacggaggagtcgaagaagctcgagccgaacacgccgtgcgtgtgcacgccgggcatgatgaaggccatccaccgccgcagcgccatcgccgacgtggtgcggcgtgcggccgagcaggacggcttcaccatgaacttgcagcccgtgtggtccgagagcgcgcagcggttcgtggcggccgaggcgctctgccgcctgaccgacgacgagttgggtcccatcccgcccgacgagttcatccccatcgcggagcagatcggcgtcatctccgacgtcacgcgcttcatgctggaccgcgcctgcgcgttcgttcgctcctatcgcggcgcccaccccggctcaacgttccgcggcgtgtcggtgaacttctcggccgtgcagttcatacaggacgacctggccgagtcggtgctggccgtggtggagcgccacggcattccggcatcgtgcctgcgcgtggaggtgacggagagcgccatcatcgcgaaccccgacgccgtgcgcgcgttcatggagaggatgcacgcgcagggcgtgcgcttctacctggacgacttcggcacggggtactcgaacctctccacgctgctggagctgccgttcgacgtggtgaaactggataagagcatcctgcgatccgcgacggagaacgagcacctggtggagttcttcgggctcctggcctccggtttcggcgcactgggcacgcaggcgctctccgagggcgtggagacgccggagcagcgcgccttcctgaacctgtgcggctgcgacctcatgcagggctacctgttctcgcgcctcttgccgcccgacgaggccgccgcggtgattgccgcgagcgaggagcgcgccgaggggtagccccgtgctgcgcaacgtagctgatgcaggattcctatcgctttaccgcgagcgttcaagcggggcaggggaagaacgggcagccgaccttcaggcattcccggttgcggtggtaatagcggcaggttatgcgctcgggcatctccatctccacaccgctcagctcggccgtgtacgccgccgcctcctgaagggcgacgaagcccgtgcgcttgcagcagcgcggcccgcccaggtcggccaggcggccgaggatgcgcgaggtcaaacgctgcgtctcggcccacggcccgcgcgtcatgggcgtggaacccgacacgatgctccagtacatgcccgcgctcacggccgcgccgcaggccccccagagcccgcaggcgccgcccggcacgttcatcgagcggtttcgcatctcggcgagcgcccggggcaggtcgaggtcgccgccggcgttcttgtaggcggcgagcagcgcggcgcccacgagcgtgtggtgctccggcccgttggggaagatggacttgtcgtccatcatggccatcgccatctccaccgggttcctcgaatcggcggacgagcagtactccatggcatggtcgacgccgcccttgcggtggcaggcatcgcacacgtaatgccccgccgtgcacacggaatgccccgtctccttcttaccgcagatatggcaggcaacctcccgcgcctcctcgaagtaatcgagcggcttcccgcacaccaggcagatcgccaatcctgctgacatacgcctctccttccctctccttcttgccggcacgacctcacgccctcaactccacttgacggttttcctcaccaccatgcccaccaacccgttgagcaccgtcaccacgacacccaccatgataacgatccctgcagcagctaaccactgcgccgtggttagcgatcataggctatctgcacagccgagagcagaaacgccgcggttcccgcactcgcgtcgcaagccaacttcgcacacctggcccgccccgccccttcccatccggcacgcctccctcccggatccgcacggttacgccgcatctcctgctatactgttcgggtataccggaaagcggcgcttgctcctccggccgtcacgtgaatgggggttctcagtggcatctcacgatttcggggacgacgtcttcctcgcgcccgcgcaagggggcagcctggcgacggtgacgctgcccatgctggaagatttcctgtcggactgcgaggtcgtccatcggcctcccgccgcgcgccgcacgttccgctggtttgccgccgtgtcgcacgagcaggtggcgagcacggcgccgagcgatctggacgacgcgcgcctgctgttcgtatgccgcctcggcatggccggcacgctcttgcgcgagcgtccgcgcgccttcgcgctcgcgctggcagacgtcggcgaggccgtcgggcccgacctcgccgacgtggccgaccgcctgctcgtcatccgccagcaggaccgcttctcctacttcatcttcctcgtacagtcctacttcatgcgccttttgctgtgggagggcgagctcgaccgcatcgcgcttcgccacggcacgctcgccgaggcgctcgacgcgagcgcgccagtgatgcgcaacttcatgttcgtgaccgacaacgagttcaacctcgttgcgcgcacctcctccatcgagccgcccgacgccctgcaccggcgcctcgtcgaaaccggctgcttgtcgccccagatgatcgcggagaagcgcttccacctgcccgagaaggcgttctacgagaaggagccctccgccatcacgccctacgcgcggctttcgcacccgctgtacctaagccacacctacttcgggtcgctgtccatgtcatgccacgtcgcgccgctcaccgaggggctgaaggacctgttctgcatcttgatacgccacgtcatgccgctgtgcgagcagcagtggcgctcgcaggtgaagctgaacataccccactacttcttcttcgagaagctgctggagcacgagcccgtgtcgtgcgagtacgtggacacgcagcgggagatggccgggctcgcggccaacgcgcagtacaagctcgtggtgctggaggtggacgagggggccgatcccgagaaggcggggcgcgcggtgcgggcggccgggcggctgaacggcggcgacgtgcactgcttcgcgtaccgggccgaggtgctggcgctctgctacgcgccgccgagcgactgccgcctcgcgcaccgccgcaccctggacgagctcgaggagcacgtgagcggccccttgggcatcgactgcggcgtgtcggagatattcgagggcatcgagaacctcgacctggcataccggcaggcgaagatcgcgctcgggctgcgccagaccatccgcctgcagctctccgccgccgaggacgccgaccgcggtgcgtacctcttcggcgacgcgctcatgtacttcctcgtggatccggcggagaaggacgagcggttcatgcgcttctgcttctcgcataccgtggtggagaagatccacgccgaggacgttgccaacaacacgaactacctggccctgttctggcactacctgaacagcggccgcaacgccaccgccgtggcctcgcggctccacctgcaccgcaacaccgtgctctaccatatagagaagatccagcgtcgcttcgacttcgacctcgccctccccggcgcccgcgagcgcatgctcctggacttcaaggccttcttcctcaccaagggcagcgagtcggtggcccggatattcgccgagtacccggagagcaaaagcgccatgcgcgcttagggaatcctcttccccggcgcgaggctcgtcgtgccggattgcagctcgagggagccgccgcaggcggcgcaggcgcgcgtgcccggatcgttcatgcagccgcacgacgggcagcggcgcacgaggatggccggaggcttctcgccccggcagcggccgcagttcatgcagtaatggcagttgcccataagcagccccctcccctcgcttcacgtggggaaccgggcggctcggcgcccggttcccgctgttcttactccgcctgctcgtcgggagcggccgcctgctcgtcggctatcttgcgtgccacggagctgcgcacgttcgggaacaggaagagcgacgccgcggcaacgaggcagagcacggccgtggccacgtagacgccctggtagtacggcacgccgtccacggcccccgtcgccgcgatggcgaggggcgagatcacgtaggacgcgatgaggaacatgccgaagttctggagcgtggcctggatgccgcccaccacgccgtagtgctcgggcttcacgctgggaagcagcgtggggagcatcttcgtgaacggcatgaccgaggccatgagcacgggctgtatgcagaagagcgcccaggtgagaggcccgtacggcaggaagaacacgagcgcgaagcacgcggcggtgcccacgaggcagatgatgaagggcgcccgcatgttcttgaaaagcttcgcgaacaccaccggcagcgccatggaagccacgcaggcgatcaccgtgttcagcgtggacaggtcgcccgccacggccgtaaggctcggatcgcccatgagcgtggtcacggcagccaccatgtaggagccgttcacgttcgtcatgccgaacaccagaagcgccacgatggccacggcccacacgtgcccgttcctcaccaccacgcgcaggtacgtgcccaccggctcgaccgagcggtgctcgccgtcgggatgcttgcgatacaccgcgaaccacgccatcacgcccaccaccatgaggccgaagctgaaccaccacgcgtcctggatggaggccacgcgcgagccgtaccagatggccagcgctgcgccggccgacatgccggccgtgtacacgcccatggcgaacgagttcgccgtcccggggaaccacaggcgcaggagcttcgcggagttcgcgttgagcgccgccacgcccatgcccatgaagaagctcgaggcgaagagcgtccagtagtcggccgagaagcagcgcgcgaacgcgcccagaagcgacacgacgaacgccgccgcgaacaccttgccgaggcccaggcggtcggccagcacgccaccggccatgcagaacagcacgcccgagaagtacggaatggacatgatcatggagaacatcatgggctcgcactggtactgctgcatcaccagaatcgccgcgccgcccggcacgatgaacgagaactgcaggctcacgagcagcaccgtcatgcctatcaggatggcccatcgccacggatagagtttctcttgcatgttcgacccccttgcgaaacgaaaaggtaacacccggcgcgccccttgcacgccgggcggcgaggccgttgaagagcctcgtccgaaacgccaccagccggtcgttttaccgaccagccgatccatggtgcagattgtgaagcgggcgggcggcttggcgccgcccgccgagagagggagcgcggcgggagcggaaagccccacccgccgcagcgccttcccgccgcgaggctacttcgcgaagatcaccatcttgtccttcgcggccgccttcgccttggcggcgagctcctccagcgtgccgtagaccatgacgccggcctggcagtggtgcacgcaggtgggaagcttgccggcctccacgcgcacggcgcacaggtcgcacaggtgcgtgggcacgggcaggtggtcgtactcccacacgccgtcggagcactggcgcgggccgtcctgcacgatcttgatgccgaagtcgcccttgggcaggtcgtgctccttcttgcaggccacctcgcaggcgtggcaacccgagcagtactggtagtcgatcagaaggccgtattcgccgatgtttgccatgagtacctcctccttacttgttctggtcgtagaagctcggcgtgtcgctcttgtgcgacgggccgtgcgtgtagccgttcgtggccgtcacctggtaggtgggctggtcctcgggcgcgctgttctcgggcgtgcaggggtacaccttcgccatgccgcacttgatgggcgcgccgtagccgctgtcgccgttctcgcacatgggaatgaggttgttcgggttgcagtcgaacacgccgaacaggctcggctcggccgcctcctgctcggggaaccaccagccgtgctcggtggacaccacgcgctcatcgagcgtggcgttcaggcgcacgacctggcggcacttgcccatctggttctcgatccaggcccactcgccctcgtgcagcccgtacttcgccgccgtgtcggggtggatgtcgaagtacggcaccgggtgcagctcgcgcgaggtggtgttcgcctggcgccactcggagtggaagaactcgaaggagcgcttgcccgtggtgagcacgagcgggtactcctcggcgagctccggcgttgccacggggctggtgggcggctcctcgtagtacggcagcgcgtccacgccccagctgtcgaacaggctgatgtagaactcgtagcggcccgtgggcgtcatgaagccgggctggccgtcggggcgcagcaggcccttctcgtacttgtagtagcggaagtcgttgtagatcatgcccgcatgctcgttctccagctcctccatggtgaagccgcaattgcccacctgcaggcgccagttcatgtagtcgcggggctccttgacccactccggccacgcatcgggattgaggcggtggcccagatcgatcatgatctgctcgtcctccttcgcctcgtagaagctggagcacttcgtgagcgagcggaccggatcgaaccacacgcggatgcagtcgcgctcgttggacatggcgcagggcagcaggaggtcggcgcatgctacggcgaacggggtcttgaacaggtcgaccacgcagatgaacgggacgttcttcatggcgcggtagatgcgcggggcgtcctggcccatgttcgtgatggggttggaggactggatccacagcatgttcaccgggcgcggatcgcccttctcgtcgaggccggtctcgcatgccacgaggatgcagtcggactgcgacgacgccgtgaagccgtacttcttcaggttgtacttggagttgcccaggcgcttctcgaccatgccctccttcaggtactcgatgccggagttgtagccgaactccaggccgcaggcctggtcgatgaggatgttgccgccggggttgtcgatgttgcccgtgatgccggccaaacacgcgatggcatgggccgtaggggtgccgatcttggacatgtccaccgcaaggccccactggatggtggaggggtgcgccttggcgtagaaacgtgcggcctccacgataagctcgggctcgacccagcagatctcggccaccttctcaaccggatagtctttcacgcgctcggcgagcgcctcgtagccgtaggtccacttgtcgatgaagtcgtggtccacgaggtcctcgccgatgatgacgttcatcatgccgagggcgagcgccgcgtcggtgccggggcgcaggcgcagccagtacttcgacttggaggcgatccacgtgagctgcgggtcgatggtcacgagctcgctgccgcgcttcatggcctccacgatccagtggccgaggaaggcgtcggagttgcacaccaccgggttcgtgccccagatgacgatgcactcgggaatctgccactcggggtcgttctcgtagcggtcggggcggaactggctcatgtctgccacccactggttgcccatgaccacgtagcagagcgccgtgcggggcagcatgcacgagtcgcccgacaggaagcagagcgtgaggtcggggccgccgaagttagcgtactggttgtgcgcgataacctgcgatacgttgcggccggtgccgatcatggagatgatggactcggggccgtccttctcctggaacgcgcgcaccttctcctcgatgaggtcgtaggcctcgtcccagctcacgcgctcccacttgtcctcgccgcgctcgcctgcgcgcttcagggggtagcgcaggcgctcctcgtggttcacgagctcgggcagctccaggcagcgcatgcagaggcgcccctggttgaacgggctgttggggtcgccctccaccttcacgagcttgccgtcgtcgtccgtgtagaagatgacctggcatccctcgtggcagcccgggcccgaccacatggtcgtgcgcgtggcggtgaggtcgccttccttccagtgcagcttcttcgggtacaggtcaaggttgtactcgttgttgtactccatacctattcctctcttccctcgtcctttgggtctccgaacgccgggtggaaccggccgctcgtcgaataccgccattctagggagcgggcctgcggccgcgaaacggaggaagttccaaaaactcgggcgaacttttggaacatcctctataggccgccgatcggggcgttttctatactgcaaagcgtggcggacccgtcggacgctgtggacgtgaaacgcgtcgtgcctgatgggagaggtatccgctcgcagcgaatgccgcgcgcggccatgcgccgacgcaccgccaacctgtcggaaccaatcgggaaagaggttgagagaccatgtgcttcagaccaacggccgtcgaactgaacaagaaatgcccggagtgcggacgctcgtgcgagccgagcctgtccgcctgccccgactgcggcgcagcgctgcccgcgggaccgtcggcaccgggcgccccgggagcggccgccccgggagcgcccggtgctcccggggcgccggcggcgccgggggctcccaagccgcccgccgtgcccgggaaggcgccggggcagaactagcctgcgggcgccccggccagccggggaggcgcgagctagcgcagggtgcggccgcaagcggccgcacggggaatcgaccagcaaggagaggaacatgggagagaaaagcaagaccggcaacgcctgggtgaacttcatcctcatcttcgtcatgggggccatcttcgccatcgggttcttcaaggtgccgcccgccatgggcagcctcatggagtacttccagtgcggcctgggcgaggcgggctggttcatgtcggcgtgctccgtggccggcaccgtcatcgcgttcgcaaccggcgccatccagacgaagatcgggccgaagggcatgctcatcgccgcgctggtgtgcatggcgctcgactcgctcgtgggcgtgctcgccccgaacgtcgaggtgttcatcgcatcgcgcttcatcggcggcctgggcaacggctttctggccacggccggccccacgctcatcgcgctcttgttcaaggatcccgccaagcgcggcctgccgaactccatctgggcctgctggacggcggccggatcgctcatcatgctgaactcctatgcgttcatcttgggcgccaccggcagctggcagggcgtgtggtgggtgtgcctggccatcgtggtggttggcctcgtgctcaccgtgttcggcatccgcgtcgaccatgccgaggagatgcagatggtggccgccggcggcgacgtcaagccgtgggccggcctcacgtccttgaactcgtggctgctcgtgatcgtgttcgcctgcttcgcgttcatcttctcggtatggtcggccatggcgcccacctacctgcagacgccgctcgtgggcatggacatggccgctgcgaactccgtgtcgtccatcaccaccgtcaccggcatcgtgggctcgctcatcatcggcgtggtgctcacgaaggtgaggaaccagccgctcgtgctcgtgggcaccatggtgctctgcaccgtggccggcgtgatccagttcgtgttcaccggccaggcggcgatcatcgtggtggccgtgctcgtgggcctgttcacgaacatcgtgccgcccgcgctgttctcgaacgcgcagtgggccgcgaagaccccggccggcgtggcgctggtcatggccgcactgcccatcggctcgaacttcggcggcatccccgccgcccccatcgccggcgccatcgtggagtccacgggcagctgggccatggtggccgtgccgctgggcatcgtgggcgccgtcggactggtgtgcgccgtcgtgttcatggcacgctgcggcaagtacgcgatgggcgccgcgaagtccggcagcgacgcgcagtagggcgacgggcaccggggaggcgtgagacaccccttccatcccccaacgtttcgcgggccccggcgcctcccctggacgccgcaaccgccgaaaccagagcgggccgcaggttcaacctgcggcccgcttgcgttggggggctttcagttccgaccttcggagtcagcctccgccttggttcccaccggggcgaaggcggaggcgccgcagtcgcggcagatgccggtggcggggtcgacgtcgccgccgcaggcaaggcagggtatggtcgggggcggagtgtagagcgggctgtccgggtcgaacttgccgcagcggccgcacatcgtacaggggtagcacatggagcgccgcctattccaaacccacgagctcgacccagtattcaagcgttttgcccgcgtatggatggttgaggtcgatcttcacggcgtcctcggtcgcatcgacgatcgaggccggcttggccgcaaggccgtcggcgctttgccacatgaccatcgagccctcctttaggtcgtaaccatggtcgagcaccgagcgcgggtaccattgcacgagcttcggatccgccgcaccgtagccctcctccggaggaatcacgagcgtgcagctctcgcccacttccagcatgagcaatgcccgctcgacccccttcggaacccggtgcccgccgatgcgcacggcgagcggctccccgtcggatcggtcgtcgcaagggcgatcccctcgcacgccgccccggtagcggatgtaagccgtcctgcccaaacgatcagtatcctccatggtatcccgcctttctcatgcgttgccccgtcagcaccccctcctcatgcagcaagggccggcacagcccagcccgtggccgccggcccggaggaacccgggccggcggcggggatgcttcgccctgacctacaagatatcctcgatcacatccgactcgtctatctcgcccaccttggcatcgtggcggtgtgcgccgaacgcggccacgccggtggccttcacctccacatgcgccgcctggtgcgcatcgcccttgtccacgtgcacgaactccccgcgcgcctcacgcgggaggtactgcggcacgatcagcagctgcttgggcttgtcggccaaccgtttcgccagctcctccacctcgccgtagcacataacattagccaggcagtggtgcacgcagatcggctcgcggcctcgctccgtgcggtcggcgcacaggtcgcacagatcggtgggcagcgggaagtagttgaagttccagttgtcctcgtcaatggcccacggcccgtccgcatggaccgcgatgccggtctttcccaccgggtagccgtgctcctctttgcacgacacttggcacgagccgcagttcgtgcagtactcgtagtcgatcagaagtccgtacgttgccatatcacaccagctttccgaatttttcccagacgacggccatatcggtgtcgtagctctcagagacgggctcgatgttgcatatcaggcacttgttgggcgcgccgaatcccagcttgcccatatgcccgttgggaagcaggttgttgatgttgcagcggaagttgccgtacaggttgggctcgctgccgtcctcttcggggaaccaccagccatgctgcgcgtgcacggtcttctcgtcgacgatctcggacacccgcgccttcatgaagcactcgccgaacatgttccacatgcgcacccattgcccgtcgctcacgccgtagcgctgggctgtcaccgggttgatctccatgatggggtcggggttcaactcgcgcagataggggatctggcgatgctcggaatggaagaaggccgtggtgcgggcacccgtcgtcaggacgagcgggtactcctcggccagctcgggcttactcaccgggctgaactccggttcgatgtagaacggcagcgggtcctcgccgaactggttgtacgcggtcgaccacagctccacgcgcccggtgggtgtggcgaagccgggctggccgtcgggacgcagcaaccccttctcgtacttgtagtagtcgatgggcacctgcgccaccacgcactgcgatacgcggtcgaagtactccccgtgctcttcgacgcccaagcggaacgcctccaccagctcgtgctcgttcgcccacttctcgaagcgctcgggatgcaggtacttgcccagacggtacgccagttccatgtcggagggcaggttgccgcagtcgatggccttgtgcatgaacccggccgtgaccgtgcagggcgcatagtgcgtgaacaccgtgccctcgcgctcggccaccgtggcgataggcaggaacaggtcgcaggtcgcctggatcgacgcgttcatgaacgtgtcgatgccgatgcagaactccagcgaccgcagcagcgcggcgcgccagcgcttcggctccatggagcagttcgtcagcgcgttgtcgcccatgtagaagcccatgcggataggatacggctcgtcggtctcgagcgtctcgagcatgcggtcaacctgcgagttcaagatcatgttgcagtaggccgggtactcggccatgccgatcatcttctggaacagctcgtcgggtatgcactccttgtacccgaagcccagctcgttgtggcccgcatccgaaccgggcagcagctggccgccggggcggtccaggttgccggtgatggcctgcaacgagatgatgcactggctgttctgcatgccgtcggtcttctgatcgacggcaaggccccataggatggcggccggcttggccgtggcgtacatgcgggcggcggcgtagatcttctccaccggcacctggcagatctcggcggccttctcgggcggcatcgtgcgcacgcgctcggccagctggtcgaagccgtagcaccagtactctacgaagtcgtggtcgtagaggtcctcctcgatgatgatgtccagcatggccatggcgagcgcggtgtcggtgccgctgcgcagctgcaggaggatgtcggcgcgggcggacagccagttcacgcgcgggtcgatctggatgatgcgcatgccgcgacgcatggcgtcgaccaccgcatggccgaagaagccgtcggggttcgactcgagcggcgccttgccccatatgaccaggcattccgttagctcgtagcgctcgtcgtcccagcgcccgggcagcgcgccggaataatcccattcggcgtacgtcgttcccgtgatgtaggccgccgctgccaagcgcggggtgtagcaggcgtagcccgactgcatgtagcagtagttcggggtgccgaacaccatggtggggtacagcgacatcgtgccgccctcgcgaccggtgcccgacatgccgatgatggattcgggaccgtactcggcgcagatgcgctcgtagttctccttcacgatgccgaaggcctcgtcccacgagcactcttcccaggcatcggccttgccgcggtcggcgcggtcgcgcttgagcggcacgaggatgcgcgccggattgtacacgtagtccttcagcgcgatgcaccgcgggcacaaacgtccctgcgtgaccggatggttctcgtctccctcgaccttgaccaagcggccctcgtcgttcacataaagcttgaggccgcatcccacgggatggcacccggggggcgaccacgggcaggtgcgcgtcacggtgagcccgtcttcctcgtagcgccagggcttgcccaggtcgttcacgtccgcgagcgtttcgagcctcaccgcttcggcggccttgtagtcttcttcccgcatctcactctccttctcgtttgccttgctgcctttgccggcctgcgggacgggggacggcccaagccgtgccccgccgccttccgcaggccgcgcgcaagccctagtaccggtagggcttcggggcgaacagcacctggttgggcttctccgcaagctcccgcgccaactcctccaccggcccgtactgcatgacgccggccaggcagtggtgcacgcagctgggctgcttgcccttggccgtgcgttcggcgcacaggtcgcacaggcgggtgggaacggggatcttgttccagttgaacttcccgtccgagcactcccacggaccgtcgtcgagcaggtggatgccccactgccccacggggatgcggtgctcttccttgcaggcaacctcgcacgactggcatcccgtgcagaactcgtagtcgatcagcaaaccgtaggcgcccatctatttcaccaactttccgaatcgatcccacacctcttgcaggtcggtgtcgtagttcctctctgccggcttcacgctgcacagcaggcacttgaacggcgagccgaaacccagcttgccaatgtacttgtgcggcacgagctcgttgatgttagagcgccacacctcgtagaggctcggctcctcgccgtccttctcggggaaccagaagccatgctgggcatgcaccacgccgggcttcacgatctgcgaaaccttggccttgagcacgcacttcccgaaggggttctccacctcgacccactgaccgtcggccacgccgaagcgcagggcgtcgtcggggttgatctcgatgaggggatccgggttcatctcgcgcaggtagggaatctgcttgccctcggagtggaagtagcagtacgtgcgcgcaccggtggtcagcacgagcgggaattgctcggcgagctcgggcgtggacacgggacttagctggggctcctcgtaatagggcagcgggtcctcgccgaactggcggaacatcgtcgagtacagctccacgcggcccgtcggcgtgttgaagcccggcttgccgtcggggcgcagcttgcccgactcgtacttgcggtaggacagcgtctccactttctggtgcaccacttcctcgcgcagctccgcgaacgtctgcttgttgttcaggcggtagtactcgaggaagtcgtagtagtcttcgaagcgctcgtagttctcgggcatgcagcgcttgccgatctcgtacatgatctcgcagtcgcccttgccctcgcccaccgtgatcgacttgttcacggcaccggccatgatgggcgacgcgccgtagtgcgtgtacaccacggtgtcgtgctcgaccgtggtcgaaagcggaaggaacagctcgcagcacgcctggatggtgggcgtcatccacacgtcgatgccgaagcaccactccaggttcttcaccatggcgtcgtgccagcgcttgggctgcgcggcgcaggtgccggcgaggaagttcgtgtcctcgaagccgcccatcttgaacgcgtacggctcgcctgtctccagcgcatcgagcaccatgtcgcattgggcgttcagcacgagccccacgtaggccgggtactccttgatgcccatgatcttgccctgcagctccgggcccaggttgttccagccgaagccgagctccagcccgtcgttcacatcgccgatgagctgcccgcccggcacgtcgatgttgccggtgatagcctcgagcgccaacacgcagtggccggcctgcacgccgttggacttctggtcgatggccaggccccaggcgatctgcgcgggcttcgacgtggcgtacacgcgcgccgcctcgcggatgaggtcggcatcgatgccgcagatcccggcggccttctccaccggcatgtcccgcacgcgctcggccagctggtcgaagccgtagcaccacttgtccacgaagtcgtggtcgtagaggtcctcggagatgatgacgttcagcatggccatgccgagcgcggcatcggtgccgggacgtaggcgcaggtgccaatcggcgcgcgtggccacccagttcacacgcggatcgatgctcatgagcttcgcgccgcggcgcatcatgtcaatggccgcatggccgaacaggccgtcgccgttggacggcagcggctccttgccccagaacacgatgagctccggcaacgtgaacgccggatcgtcgtagcggccgggcagtccgccggcgtagtccatctcggggtaggtcgcgcccagcacgtaggtggtgccggccacgcgcggaatgtagcacgagtagcccgattgcgtgtagcatgcgttcggcgtgccgagcgccgaatgagcgtatgccggcagcatggggccgccctcgcggccagtgccgcccatgagcaggatggactcggcgccataggtctccttgtagtaagcaaccttctccgcaatcaggtcgaatgcctcgtcccacgagatgcgctcccatttgtccttgccgcggtcctcgcgggcgcgcttcatcgggtagcgcatgcggtcggggttgtacacgtagtcggggatcgtcaggcaccgtacgcacaggcgtccgttcgtgatcggatggttctcgtcgccttccaccttcaccagctcgcccgcatcgttcacgtaggttttgatgccgcagccggtaggatggcagcccggtggcgaccaggcacagccgcgtatgacggtgaggccgtcctcctcgtagcgccacggcttgccgaggtcggacgttccctggcctttgaaaatcttcatgccctctcctcttctcgtctttgcatgtcggccgtcggccgacgctccggcctacgggccgggcgcggcgcgaagcggccacgcgcgccttccggcagggggagccccggccgagccgcagccgggcatgccgtcaaggcttcgatgatgctcctttccttgtctcgagcgccgacgggcgcgacgccccgctcggcacagcgcgcccccgcacgatccggctcgcggcaacgctgcctgcatggcccctgcgatggggaacatggcactgactgcaatctaggccgcaaacacccggctgggaatcgtacgcgaattgcgaaaaacgccgatacggcgggaaacccctcgtactccacgtccgaatgacggtatggcgacaacgtcttacctgatcagatcgctgaaaaagaaacggtccctcgaaagggaccgtttccgccgtgcagcgcctcgatgcggctagcgcagcttgcgcagaccgatgaagaagatgacgatgcagatgaggtagcatggcacgagcacggcatacgatgccgtcgcccatccgaacgccgcaacggcgttgcccatgaacatggcgcccacgaacatgccgaggttctgcgtggtggccacgagcccgttcgccacggggacgtcgtcggggtctaccgtgtcgggcgtggccgcccagatgatcgagggcacgaagccgcccgcgatgccggcgaggatcatgatgccccagtacagctcaggcacctggcaggtgaacaccacggcggtgtaggccacgccgccgatgagagcgaacagcagcacccacttgcgcgtcttcagccagtcggagatcttgccgcacagcggcgcgcagatagcgcccgccacgccgaacgccgaggcgatgcccgtggcccacaccagcgtcgtcgccagctgctcggtcaggtacgtggtcaagaagccgttgatggccatgaacgcagcctcgtcgaagaagaagatcataccgagcgcccagagcatcgggttcttgagggcgcgcttgaagtcggccttgccggctacctggtcctcctcggtctgataaggcctttccggctcgcggtagaagacgacgaacacgatgcccaccacgatgtcgaacacgaacgtgccccaccacacggtctgccagggcagggcgagcgtgtccaccacgtacccgtagagcaccgggcagatgcacatggcaagcgccacccacatggcccagatgcccagcgggaagccgcgtttctcgggggcgaaccatggggcgatggccgaggcgcccgccacgcccatgacgcccatgccggcgccctcgaggaaccggctgaccatgaacacggtcacgttttcggtgagcgcacccatcaccgaacctactgcggcgcagccgatggctatgagcacgacgttgcgtatgcccagcttgttgatgagacccgccgtggggaacgccatgacgaagccgagcacgtagaacagggcgattacccatcccaaggtgtcgggaccgaacccgaacgtctgcatgacgaccggcgcgagcgcggtcaccttggccatgttggccggggcggtgaagccggccaaaaacgtcacggccagcacgacccagccgtaacttgagtccgtactcttggtttttactgccataagagccctccttcgagaatgaccgccatgtctccccttcgtttatggctcccccataaacaagatcgccgccagggccgcagagcccggagcacagcgcgattattccgcgcaggaaggtcgcctgtgaattggccgcaaatgaggaaaagacgctcgccgcgggtaatgaggcggcactacgcggtctcatgccgcccgtacgaggcctcgcaccaacgtcacaacgcgcttgaggcggagacctgctcggacagaccgcccgaggcctcctcgtcgacaggcacctcgatatcctcgatgaagtcgagcagctcttggcgcgagtggatgccgaacttgcggtagatgttgtagatgtgcgtcttggcggtggactgcgagatgtagaacgtgtccgtgatgtacttggcgtcacgtcccttgagcaagatctgcagtatctcccgctcgcgcggggaaagtccgtagcgctcgcaggcgatcgccctcttctgctgccacagcgtcttacgctggccctcgtactcgaggtgcgcgcgcgtctcgtcgtcgagccctgtctcgatgaccggctcgaacgggtatatctggtagttcacgcgtatctgcatccaggcgcacaccacggctgccgccacgcaggtggcgtacagcgccgaggggctgccttccgacgccaggccgccaactgagaagaggacgcccccggcgaagatgcccgcgaagaacaccgagccctcctgcccgaacagccataccggcgagatcatgtcgaagcgcgacgtctccaccaccgcattcaagaggacgatgacgttgaggctgacgaaacaggtgtagaggcagacgagcccgagctgcacctcgctgggaacggcgggcagcggaagcagcagcagggcagccgcgaacgcagggctcttcttcagcgcctccttgtaggtgcgctcgtcggtctgctccaagagcagcgagaagatgcccgcgagcccaaccgaggcgccaagcgccacgagggcgacatcggggggatagccgaggaagaacgcgagcagcgagccgccgagcatgaaccccagcatgagcagcgtgtggttgttgcccttcaccttgatgctgcgccgtttggagtcctccgcgcccaccaaatcgctgtagcggtagggcttgcgggagaacaggagcgagagggcggcgcagagcgccacggccacgaacagcatggcataggcgtaccagaaacccatctgcgagagcaccagcaacatgacgcccacgtacatgaacgcaaggtcgaacacgagcatgagcgcccgccgtgccaaccgctcgaggaagcgcccgtacaagaaggccgtcgccacgaccccgaccccggcgagcgaggccgcggcaagcgggagcccgaaaccgagcgcgcccatggccgcgagcgaggcgatcgtctggacggcgagggtcgcgcgcctccccgccccggactgcagcgcatcgcaggcaagctggcccgcgcggagggccacggctgcaacgagcgccatggacacggcgacgacgctgccgtgtacgaggccaggtgatgcgcacagcgccgcaacgaggatcagcgcggcgttgcccacgcccacgccgaagccaaggcagccgtccacgagcacggcctcgaaatccccgccgttctccccgatgggcttggcgggcgcctcgcagacatcctcgcaagaatacgaagtatccatagcggtccccctacctgcgcgaaacttatataccagcggcaagatcaggttaaaagcctgatcatttgccctttcaccttacggcatcgaacgtttcagccaccggagaacaacgcggttttcggcggcggcgccctcgaggcacgctcattacactcacgcgggcctcatccccgccttcgactttactatcctgcgcctggtcaaaccatcgtacgcgaagtatgaaacgatttgcccgcctcctaagcgaggtgctagcgcatgcggcagagggcaaggaggatcgtgcccgcaagcccgagccccatgagcacgccgcccgcaaggaaccaatgatccaaggacgggccgaggagcatctggacgaggaacgttcccaggaactggccgaccccttggaccgtgaccatgaggcccatgccgaccgaggcgagctcgggacgcgggacgagccctacgaaccccgataagaacagccccacgccgcccatgccgaccaagcccatcaccgccacggcaatcaacatgagagcgcccgtatcggtatacaggaggaaggtgcacggccccatcacggccgatgccgcgaccagcagggccttacgccgtcccctgcgatccgagatcgccccgaacaagggcgaggacgccaccgatagcagcatgggagccgtgctgacgagccccgaccaggtagggtcgacaccctgcatctgcaggatcgtcggaacgaaggagagcacggccaggaggcagacgttgaacatcgcgaagcctccgagaaaaagcaggatgtcgcgcgtcagcagcatccgccaaagcccccacgcggcgcaaccgcgggatcgtccggacgcggcaccgctttttgcagccttcgcctcctcggccgccgtccgggcgcgcggcatcctgatggccgccagaacgagcacggcggccaggacggcgccgacggcgaacaccgtccacactcccgcgaaccccatcgcctcgaacacggtaggcgtcaccacggccgccgccgtggagcccacgcaaccccaaacgccccagatgcccatggccgtgcccaccttgtccgaatccacgcacgccctgactaccaagggcccgcacgtggtcagaatcgtcagggcgaccccttccaccgcacgcgaggcgacgagcgccgcgctcgagcccgcagccagcccgatacacgatccggtcacggcgatgcccaacgccgcaaccatcatgttcttcgcgccgaaccgctgcgccagcaacccggacggcaatgccgcgaacacgctcgccagcgtgaatatcgacatgagccaggaagccgcctcggcatccatggcgaaaagcgccatgagagagcttaggatggtgggaaccttgtattggatcatggcaaccgcgacgccggcagccagcagcaccgtcccaacccgaacgggacttcgataggcgcccttcttctcccgacggcctgcttccctgtccacgcagactcctctctcgatggttcgagaacacgataggcgatcgctcggccgcccgctatcgaaagggaagtccgatatcggctggtcgtctcatgcttcacatacgataggcatgccgtgcgcttacgtttaccatctgatccaagcggaaccgggataccaaccgttgtcgttcgggacggccgcccggcttccccgtgcaacccccgcgacaaggaggagaaaacatggcagacgagaagaagcccgttcaagacgagacggccgaaaagaacaaggaggcgaaggctcccgtcagcgagatctgcgggaatgcggaagagggcgcagcggcgctcgtggacgacgacagcgagatcaggcccgtcgagggattcttcctcacgtcgcagcgctggcattagacgcagggcagcggatggccgcgagtcgagaagggccacgtgtccggaacaaggaggcttcaccatgccgagcaaagggcaacgcgtccgattcctgtaccgggggagcttccccgacgggaggacgttcgacgactgcaagggcgtgccgcacgagatcgtgctcgggcgcaggcaggtcatgaaggcgctcgaggagacgctttccgccatggagccgggcgaggagcgcatcttggagctctcccccgccgaggcgtacggcgcctacgacgaatcggcgctgcagcgcgtgcccacctaccgtattccgaacggggagaacctgcccgtggggcagatgatcgcctggaagacgccgcgcagcgccgagccggtgcccgccaccgtcgtgagtgtagagaaccaagtggcgacgctcgacttcaatcatcccctcgccgggaaggacctcgtctactgggtcaagctcatcgacgttgtgccggcggcgggcgatccgaccgcctgacgatgcacaagggcggtagcccgcactccgagggccgagcggcatctcgtacgcaagggccaaacggccctccaccggcccttccacgcaacggggcccgctgctttcgcggcgggccccgttgcgtgcgcgcgggcggcggtcggcgctacgccagcgcctgctccacgaaggcgctggagagctcggcgcctggctcgccctcgtactgcgtcatgaggaagtgcgtggccttgcggatcatcgtgggcgtctggcccaggtcgtgcgcgatgtaggcgatggcctccggggagagcacggggctcttcccctcctcggtgtagtcctccacgaggccgcgcacgtactcctcgaggccggcgtcgtcgagggcctccatggtcacttcctcgaagtcgcccagcatgccgccgaaatcagacaggtcgtactcggacagcggcttggtggaggtgatgacggtgtccaggcgccgcttcaggcgctcgcccagcagcagcttgcacatcataggccccatctcgggatcgtcgaagaagccctcgaagtcgtccaggaacagcacctcgtaggtgcccagatcctcgaagtagccgtcgtagacctcggcgcgcatggcctcgggcagctccgagcaggggcggtagagcaccttcttcgtggacagcaggtccttgtccagctggcgcccgcgcacgagcgtcgtcttgccggactccttcgggcccacgaggaatatcttctcgggcttgtcgtgcggctgggtgatgttcgcgatgcgctcgaacgcctcgcggttgccgtcggtcttgacgaactcgtccagtggcattctcatggtgatggctcccctttcgccttctttgcctgaccggccgcgaagccgcgccgccggggcgcgctccgctgcgatgtaccgccattcatagtagcaaggccgccgacccaaggcgagtatgaaggccgcaactcataccagaaggggtatgccgctgcgtatgagcttcatctcctccccctcctccgctgtcaaattccatttgtcatcccgcacattttcggcggctactcgcggcgggcggccgcccgcacaatggaggcgcaccgagggggaaacccgacatcgtgcgttccatcgttttaccgacgagtgagaggagaagcacatgaccgagtggaagcggcaagagggcgaggagaccatcttcaggacctgcgcgtggtcgcctccgggatgccatccggtgggatgcggcctgcaggtgcacgtcaaggacggcaaggtgacgaaggtggagggcgatcccgagcaccccatcaccaaggggtcgctctgcacgcgctgcctggcgctgccggagtacatctaccaccccgaccgcatcacgcaccccctgaagcgcgcccgcgaggaccgcggcaaggacaagtgggagcagtgcacctgggacgaggccaccgacctcatcgcccagaacgccaaggagatcaccgagaagtacggcgccgaggccatctgcgtgttcggcggcaccggccgcgagggcaacaactggtacccgcagtgggccaacctcgtgttcggcacgccgaactccgtgtacgcccaggccggctggtcgtgctacggcccgcgcatgacgaacaccgcgttcatgatcggcggcggctaccccgagatcgactacgcccagaagttcgaggaccgctacgagcacgagggctgggtcgcccccgagtgcatcctcatctggggcaaggaaccgctgcgctccaatcccgacggcttgtacggccacgccgtcatcgagatggtgcggcagttcggcacgaagctcatctgcgtcgatccgcgcgtgacctggctcggcacgcgctccgaggaagtgctgcagctgcgccccggcaccgacacggcgctggccatggccttcatctacgtcatggcgcacgacgacctcgttgaccacgacttcatcgacaagtggtgttacggctacgagcagctcgtcgagcgcgtgcaggacatgccgcccgcgaaggccgccgagatctgcgacgtgcccgaggagcagatctggcgtgccgcccgcctgtacggcaacgccaagcccagcagcgtggcctggggcctcgccgtggacgagaacccgaacggtacccagctcggccagtgcctcatcgcgctcatggccatcaccggcttcatcgacgcacccggcggcacgacgctcggcatgggcgacgaccaaggcaacgtcgtgcgcgacggcggctccatctcggccgacgagaaggtggacgacgccaccgactccacgctggagctggccttcaagaacggcatcatgaccgaggagacctgggccaagcgcatcggcatcgacaagtacccggccatgggctccatcctctggaccgtcatgcccgacgagttcctgaaggcgctcgagaccgagaagccctacaagatacacatggcgcatttcatctcgtcgaaccccatcggcaccgccatctccgccgagccgcagcgctggtacgaggcgctgaagaagctcgacttctgctgcgcggccgacctgttcatgaaccccaccaccatggcctgctgcgacgtgttcctgcccatagcctccaccatcgagcacgacggcatggtggtgacgcactacggcctgaactcgtcgttctacggcgcgcagaacaagtgcgtgcaggtgggcgaatgcaagtccgacgtggaggccatgatggccgtgggcaagaagatgtaccccgacttctggaaccgcttcgagacgcagaccgactacgacaacttccacgtcatgcgctcgtggctgccctacgaggagctgcgcgagaaggtcacggtcatgtccaacgagccgtacttcaagtacgaggtgggcaagctgcgccccgacggccaggtgggcttccccaccagcacaggccgcgtggagctgtactcttacatgtacgagcagttcggcgagaaccccctgccctactacgaggacccggcctacggccccgagcgcacgcccgagctcatggagaagtaccccttcatcctcaccacaggcgcccgccggcaggagttcttccactccgagcacaagcaggtcccgagcctccgccagatcacgccgtacccgcagatcgacctcaaccccgccgacgccgcgcgcctcggcatcgaggaggacgactgggtggagatcgcctcgccctacggcgccgtgcgccagcgcgcccacgtggtgcccaccatcaaggagggcgtgtgccatgccatgcacggatggtggtaccccgaggaggacggcgaggagccgaacctgttcggcaactggaagtcgaacatcaacgtgctcatgcccaacagcgtgaacggcgtcatgggcttcggcaacacgttcaagcagatgatctgctcgctcaagaaggtcgagggagaagggggcccgaacgaccctgacagcaccggcatcttcctggagcccagccgacaggccgagttcacctaccagcaggtgtggcgccccaccgacgagacgcagcaggcctaaccacgacacgaaggaggaggtaacgaccatgacgcagaaggccctgtacatcgattacgagttctgctccggctgccacagctgcgaggtggcctgccgcaacgagatcgaatgcggcatagacgactggggcatcaaggtgctggaggacaagccccgccagcacgccgacggcacctggcactgggactacatcgccctgcccggcgagctgtgcgacatgtgcgaggagcgcacggaggccggcaagctgcccgcgtgcgtgcaatcctgccaggccaagtgcctggagatcggcacgatcgaggaatgcgccgccaagctcgcggccaagggcaggaaggccgcgatcctcgtcccctagggggcgcggccggcacggcatgaggggacgggatgcgcgcccggtgcagggcggcgggcgcgcatccccgctacgggggaggtgcaagcacgtggggagctgtggagcgttctgctcgttctgcggaaggtgcggcaagaccgtcgagacatcgttctccggcccgcggccgaccgacgcggctccgccgggcgtgccgtcccgaagcgcctcggcggttaccccgcagcatgcgtccgccgagcctgtcatcgacggcgaggcctccgacggccccgtgccggccaagccgaacagggatttacgaagctctaccatccataacgaaggaggggatactcttgagtgaaaacgcagccgcgctgtcccggaacaccatggacggcaagcaggtgaagaagctcgtcgccatcgtcgtggcggcgctggtcttcctgttcttccagttcgcatgcccggttcccgcagggctggagcgcaccgccatgtcggcagtgggcatccttctggcctgcatcattctctgggtcacggaggcgctgccgttcatcgtcacggtggtgctgatattcttcctcatacccgtgaccggcatcctgccctatgcggcaaccgagacgcaggcgagcgtgttcaactcgtcgagcctgctcgtgcccatctactgcctgttcgtgttcacggtgtccggcgccgtcatgtccacacccctgccctaccgcgtggccagcgccgcgctcaagttcgccggcaacagcaccacgaagctcatcgtgggcttctcggtggccacgtcggtgctgtccatgttcgtttccgacctggccgcgtccgccatcttcatcggcatcggcctgtccatcgtcgaggcgaacggcggggtgaagggcaagtcgggcctcgccaaggcgctcacggtgtccgtcgcggcggcggccgccatcggcggcatcggcacgcccatcggcaactcgctgaacatcctgtgcatgacgctggtggagacctacatgggcgtgcgcgtgacgttcctcgcctggtgcgccgtcaacatcccgctggcgctcgtggtgtccgtcatctcgggcctgtggtgcgccaaggcgttcaagatcgaaaagatcaagcccgaggccctgtccgtcgtgtccgcgaagctcgccgactacggcaagatgaccgccatcgagatcaagctcatcgtctggttcgtcatcgccttcggcctcatgatcatgagcacgtggttcccgcagatcaactccatgctcgtggccttcgcgttcaccatcatcgcattcgtgcccggtatcaacctgctgagcaaggagcagtactacaagaacatcccgtgggagatcatcatgatgatcagcggcgtgcaggcgctcgccacgggcctcgtgggcaccggcgtggccgcctggttcgtgaacaccgtgctcgccggcgcatcctcctggccgctcttgctcgtggtgctggtcatgtgcgtcatcaccatgatcctgcacatctgcattcccgtgggcccgcccacggtgtccgttgccgtgccgctcatgatagcgctcgccgccaccaccggcgtgaacggggccgtcatcgcctgcatcggcggcatcctgggcggcgtgaccacctggttgcccatcgactccatcatgatgatctgctacgagaagggttggatcagcatgacggagtggctgaagaaggcgtgggtgcccaccgccgtgctctgcgtgctgagcgcgctgtacctgcccgccatgaccggcctcatgggctactagctctgcccctcccggcggcccctccggccgccgggaggaccctcgccaggcgcgagaaccgtatcggcacctgcacacgctaggaggcggcaatggattccggctttatcggcacgatcgtcgtcggcatcgcgttcctcgcgatggccgcgatcgtcggcagaaggctcaacaagggcaagacgcgggagcagcggatgcgcgagcggttcgaggagtacgaccgcaagatggaaaagttccgccgctagcccccgctctcccgcgagcccgacgcgcttgttttctacccacactttctacccacacgaaagaaggagaaccgccatgtgcttcagaccagccaccacctcgacgcccgttcccggagcaggggcgcccggcgcccccgcggctcccggcgctcccggtgcccccggggcacccggctcacccgcggctcccggcgctcccgcaacacccggcgcccccggcacgccaagcacccccggcgcccctgccgcccccggcaaaaccgccccggagaaccccgacaactaagccgttttacggcaagccccaaggagaggcccgatgaccaccccgcagataatctcaatcgccgtgttcgccgtcgtcatggccctggtcgtgtccgagaagatccaccgcgcgctcgcggccctgctcggcgccgtggtgctgttctgcatcggcatcgtcgacttcgacgccggcatgggctccatcgacttcaacaccctcggcgtgctgtgcggcatgatgaggttcgtagcggtggtgcgcaagtcgggcctgttcgaatacgtggccattcggtcggcgaagctgtgcaaaggcgacccgtggaagatcatggccgcgttcgtcatcatcaccgccctgttctcggcgctgctcgacaacgtgaccaccatcctgctcatcggccccatgaccatcatgctgtgccgcacgctcaagatcgacgccgtgcccttcctcatcgccgagatcgtggcgtcgaacgtcggcggcacggccacgctcatcggcgacccgcccaacatcatgatcggctcggcggcagggctcacgttcttcgacttcatccgctacgacgcccccgtggtcgtggctatcctcgccgtgctgctggtcgtgttcaaggtgctgtacggccggaagctgtcggttggcgcggacgccgtgcgcgaggtcatggccctctccgagcaggatgccgtgaaggatcgccccctgttcgccaagagcatcgccatgatcgtggccgtcacggccgctttcatgctccacggcgcactgcacctcgagtcggcggtcatcgccctgggggcggccggcatcatgctgctcgtctcggggggagacctggagggcgccctcgagggagtggaatggggcacgatcggcttcttcctcgggctgttcgtggtggtgggggccatggagcacacgggcgtgatcgcgctcttgggagaagggctcgtctcgctcaccggcggcgatacggtgctgctcatgctggcgctgctctgggggtcggcgctgctctccgccgtgctggacaacatccccttcgtggccaccatgatccccatcatcacggtcatggcgtccgcgggcgtcgacgtgttcccgctgtggtgggccatatcgctgggcgcgtgcctcggcggcaacggatcgctcgtgggagcgtcggccaacgtcgtgctctccggcatcgccaacaaggagggctaccccgtgagcttcataggcttcacgaaggtgggattccccctcatggtgctgtccgtggccatcgcgacggcgtacctgctcgtgatcttctaggcgcacggcggcccgagccgcaatcgctcctctgtccgggcccgaccgcaacccatgcggccgggccctgcgcacatcgcgtcagaacgtgccccgcacgccctgcgcgaacttcgcaaccgtgggaaagccgggtgcgcccttcttgaaaaggatgtagaagcgccagttcaaccgggaatcggagagcggtatggcgcagaagccctcaggcggcgccaccgagaacttgtcggagacgatgccggttcccccgcgccgcttcaccacatggatcatggagctcgtgctgggtatgacgctgacgttcgcgcggtcgcagccgagcgcgtcgagctgctcgaacagcggctcgtactggaaggtgggctccgacatgagcagcagcttctggtctttcagatccgcgcccgcaagtccctccttgcgggcgaggggcgacgaggagctcatgagcgcgaacgacgctgattcgcctatctcgagcacgtcgcattcggggaacttccgctccatgcacatgatcacggccacgtcggccttccccgagcagacgaagcggtagcaatccgcgcagctcgcctcggctatccgcaatcggtcggcatgctgggcgatgaactcgtcagtgctcggaggtatccccgcgaacaggttggtgctcaccgccaggttcagcacctcgtcggacgcgtcggagttggcgaaggccacgtgcaggccgtcgaccctcgccacgatctcgcccgcctcgctcgccagctggcggcccgcgggagtgaggagcatctcgttgccgcgacgctcgaacagcacgatgccaagctcgctctcgagcgcctttatggaatgggcgatgttctgccggctggtaaagcagctctttgccgcctgcgcgtagctggtatgctccgctgcggcgagcatatggcggagctggtggatctccatgcgtactaccccctgaccctccgggtgcccccgccgtctccccaagccgctgcggcaccgccctgtcgagccccttcggatggccatgctcgcgccatccgctccggaagcctgccggacgggcctctggctcccagcgattcgattataaccgaatttcccgccaccgcaacgaacgggctctccgcggtgctcgggcgtcccttcggggctgcatccaaatatctgcgctgaccagtcatcataatcgggaattgtcgatctttttgccgactgttcggatatatccgtccttctgcagcgcagcttagatagccttcaccgtatggattatttcgacaaaagaaggcagctgggccagcacatcgtggagatgcgcaaggcccagcgcatctcgcagaagcagctcgccctcatgtcggacatcaacaaggggtacctctcggaaatagagaacggcatcagcaacatcagcgtcaacaagctcttccggatagccgatgccctcggtgtgccgcccatggacctgttcgccggcatcgagggcgaggaagagggagactgcgccaccacctagcgccgcagggatttgccgcctggcacgatacccggcattcggccgcacacggcagccgtggccgcgcaaaaaaagaaccggccgaagccggttcctccgtgcgtcctgtacggcaaggccgtcctcccagtgctcagacccgagggcggctccgggaacggtggcggcagagtcgcgccgcatgcggggcacgtaggccgcccgggatcgggctcctccctgccgcacgacgggcagagcctatgccccaaccggtccttcatctcgtcggcgcgcccgcaccggttgcacagggtgcagcagtagcacacggattcctcgccccctttcccgcggaggcgacgcgcagcatccggcgccgcctccgtccgtaccgtcctaggcgcagggcgcccagagcacctgcttgggcttgcccgccaactctgcggccagctcctcgatcgtaccgaacctcatgcagaatgcctggcagtgatgcacgcacgtcggctccttgcccgccgcaacgcggcccgcgcacaggtcgcacaggtcggtgggcacggggatcttgttccagttgaagcagttgccgccctcgcccgaatcgtccttctgccacggaccgtcatccagcacgcggatgccccacttgcccacggggaagccatgctcctccttgcaggccaccacgcacgtctcgcacccggtgcagtactcgtagtcgatcaaaagcccgtattcagccatctctacaccaactctccgaatttctcgacgaccaggttcatgtccgtgtcgtagctctcctgcaagggcgtcacgctgcagcagttgcacttgtagggcccgccgtagcccaagcgcgagttatagtggttcgacacgaggtcgttcacgttcgactgccacacgccgtagaggccccgctcatcggcatgatcggccttcacgaagccgtccttaatctccttgccgttgatgacggcctgcacctcgtggtcctccacgatctcgcccacgggaaggatcgtgtcgcgcgcatcgtcgtcggcctggcgctcggggaaccaccagccgtggtcggtctgcaccacgcccttcttcacgatgggagacacgacggccttgaacttcgcgcggccgtagtcgttcctgatctcgacccattggccgtccgccacgcccagctgtgccgcatcctcggggttgatctcgatgatcgggtcggggtgcagctcgcggagcacggggatctgccggtgctcagcgtggaacgacgcgtagttgcgcgctcctgtggtcaggatgaacgggtacttcgccgcgagctcggggtccttgtgaggactgaacgccggctcctggtagtacggcagagggtcctcgccgtaatgcgcgtacgccgtcgaccacagctccacgcggccggtgggcgtgaggaagccgggcttgcggtcaggacgcagcttgcccgtctcgtacttgcggtagttcacgccgcgctggaacaccacctggtcgcgcaggtcctcgaagggcatcttggcgggacgcgcgcggcgctgcgtgaggaagtcggcctcgtccttgaacaggcgcccgccgtcctcgtccttcaggcagtccatctccaggtactcgcccagctcgatgagtatctggatgtcggacttcacctcgcccacgtccacggccttgttcaccgagcccagcgtcaccggcgatcccgcgtagtgcgtcatgaccacgtcgtccttctcggcgcacgaggccaagggcagcacgaggtcggcgaacgcctcgatggcgggcgtgatgaagcaatcggttgccatgcaccactccaggttcttgcagccctcgtaccaaccggtcggctgggcgcagcacgtgggggtgagcagcgccgtggactgtatccagcccatgcggatgcggtacggctcgcccttcgtcaccgcgtcgaacatcatgtcggcctgcgcgttacgaatgttgtccacgtagagcggatactcgtcgtagccgatggtcttgcccttgaggtcgtcggacagcgaatcccagccgatgcggcgctgcgggcgcgcggcgtcctcggccgaggtgtcgtcggccttgtcgatgtcgagcgtggagccctccatcgccgcggcctcggcagccgcctgcgcctccgcgtcgtcctccacaccgggcgccgggtcgatctcggcgatgatctggccgccgggcacgtcgatgttgccgcagatggccatcagcgccagcacgcagtgggccgcctggttgccgttctggttctggtcgaacgcaaggccccaggcgatggacgcgggcttcgcggcggcgtacaggcgggccgcccggtagatatcctccaccggcacctcgcagatctccgcggccctctcgggcgtcatgcccttgtcagggtcgttgatgcgcgcggagaactcctcgaagccgtacgtccacttctccacgaagtcgtgatcgtagaggtcctcgttgatgatgatggacagccacgccatggcgagtgcggtgtcggtgccggggcgcacccgcagatgcacctctgcgcgcgtggccagccagttcacacgcgggtcgacgctgatgagcttcgcaccgcgcttcatgagatcgatgaccgcatggccccacagcccgtcgccgttcgacgcgagcgccatcttgccccacatgacgatgacctccggcacccggtacacggggttgtcgtaggttccctccaggccgccggcgtagtccatctcgggatagtaagcgcccagcacgtgcgagcaggacatggagcgcggctggtagcaggcatagcccgactgggtgtagcaggcgttcggcgtgccgagcacggcctgcgccatgtcggccaccaggatgccgcccgagcgccccgtgcccgagaacacggccatgctctcggggccgtaggtgtcgcggaagtagtcgcgcttctccttgatcagggcataggcctcatcccatgtgatgcgctcccacttgtcgtgttggccgcggtccttcggatcgcgcttcatcggatagatcacgcggctcgggttgtacacgtagtccttgagcgccaggcaccgggcgcacaagcggcccttcgtgatggggttgttctcgtcgccctccacatggtcgaggcgcccctccgcatcgacgtagagcttcaggccgcatcctaccggatggcagcccggcggcgaccacatggacgtgcgcacgacagtgaagtccccgtcctcgtacttccagggcttgcccaggtcgttcttgaattccataccgttacctctctcttatgctagttgcttgcctgcgtgtcgagcgcatctccggcctccgcccacgcaagcttcccacggcgcgcataggcaaggcggaccgtcgcgaagcccagggccgtgatgccgatccccagcgcgaacgccggcacgaagctgcccgtggcgtcgaagatggcggccaccgtcaccgggcccaggcacccgatgacgccggtgccgatacgggcgtaggtgaagatggccgggaagtcgcgctccccgaacagctggcgcacgagcagcggggtcgacaccgacacgagcgagttctgcgccccgaacaggaaggccgacgcatacagcagcaccaggttgtcgcccgcgaacatgaagcccgcaaaccccaacgccaccatggcaagctgtatgttcaccgtgaactgcacgcccacccggtcgttgagccagcccaccagcagcttctccaccacgttgcccaccatgacagccgtgagcagcgacgatccgaccaaggcggagaacccgatggactgcgcatagcccggcaggtgggagttgaagcccgcaaagtacgcgatcagccccgagaacaggaacatgcacacgaacggcaccgtcttcagggccttggccagcggcacgccgggaagccccgggtgcccgcccgcgcgttgccgcccggcccggccgtcccgctcgtcctgcccggtccagccgtacggcttcatccccacgtcctcgggacgcagcttgaacacgaacagcgtccacggcagcacgaggagcgccatgacgacggccgccacgaagtaggcctcgcgccatccgagcccttggatcagcagggtgaacaccggcccgaggacggcgccgccaatgccggagaacgacatggccacgcccagcgccaggcccttgtgcgactggaaccaattgccgatgagaatgggcgtgggcacgacgaagatgaagctgcccgccaggccgaacacgatgcccgatatccaccactgccagggctcggaatagagccccatggccgccaccgcggcaacgaccaacgcgaacgacacgctcagcacgcggttcacgttgtacttcgtgatccacttccccactacgggcatggcgaacaccgtggcgatgaagtagaacgtcaggtacatcgagagctccgagcgcgagaaacccaggtcctcgcacaccggcacgaagaacacccccgcggcgtccagcaccgcgcccaagccgcccgcctgcatgaagcagcaccctatcagtatcagccatgcgtagtgaaaccgtggtctcgccgccgtcatgagctaccacctctcctttgccgggaaaaccgctacgagcggctcttctcgggctcgccctcctcggtccacttgccgcggaacttcttagccgtggtcgcagctaccacgatcaccgccgcgatgacgatctcgaagccgatgccgcagccgtaggcggcctggaacccgcctgccaaggaggccacgagcgccacgaacgtcgcgcccaagccgcccagcacggcgatgcccatgttcaggtaggaatagatcttcgcgtagtcgcggtcgccgtagcagtggcgcgtgagcagcgggagccctaccgacatcatggcgtcgcccgtgccgatgcagaagccggcgatgagcatgggcacctggttgtcgcccatcatgaacaccatgagcgcgaagcccgccatgctcaccacggcgaaggccaccatggagttcatgatgccgatcttgtcggagagcgtgcccaaggtgatctttccgaggatgttgcccaccgcagctgccgatatcatggacgcgcccagaagcgcgagctcggtgccgccgacggactgcacggccgtgggcatcatggacttgtagccgccgccaagcgagatgaggcaggcagccacgaagatgcagtagaacgcgacggtgccgagggcgaacttgccggagacgccgctcttcttcgccggctcctggcctgctgccgtctccttctcgatgccgtactgcgcgagccccacgtcctcgggccgcgtgcggaagaagagcacggcaggcaccaggatcagcacggcggagatgcccgcctccacgaagaacgcggactggtagcccatcgacttgatgagcccggcgaacagcggcgaccatacgaacgtgcccacgccggtgaaggccgaggctatgccgaggaacttgccggcctgcttcggagcgaaccagttgttgatcagcaccgacggccccacgaggaagatgatcgggccggcaaggccgagcagcacgcccgagatgtagatctgccacacctcgccccacacgcccagcagcgccacggccgccacgacgcacacgccgccggcgccgaacagcacccgcgcgtccaccctgtcgaacaggcggccggcgaacggcagccacacgagcatgacgtaggagtatacggtcatgagcagcgtcacctgagtcacatcgggcttgccctcgggcgtgaccaggccgaactgcagcgccatcggcacgaagaagttgcccatgacgttgagcaccaaacccatgccgccggccatcatcatgcacacgccaatgaagacgagccaagcgcgatggaaccccttcttttcttctaccatttcagttacctttcccttgcagattacgagtagaacaccgaagacccccgcgcatcacccccttcccgtacccgccgtgcccgcgcacccggcacgggcacggccttcgaggggctcagcgcgtgagcagcgcgcagcgcgacgtaccgtcgatcttgcgcgccagctcctccacctcgccgtagtacatacaccacgcctggcagtgctgcacgcacatgggcagcttgcccgcgtccgtgcgctcggcgcacatatcgcacgccttcgtgagcacggggagccatgtccactcccagcggtccttgttgccctcggcgcccgaatactcgaacggccccgtctcggtgagcttgatgccgaactcccccgccggcaggccaaggtgcttcttgcaagccacctcgcaggagtggcagcccgtgcagaactcgtagttgaccagaatgcccttcactagaatctccctccctcgcgcgtcgtgttgtcggtcgtccacgcgaacggctgccccgccacgtagtcgctgcggaacccgcccagcttcgtgaccacctcgccaggcgttggctcgtccacgtcgtcggtgcacttgtatatcttgcagacgatgctcttgagcgggttgccgataccgccgtggcccgtctcgtaggaggcggtgaggttgttgatgttgcactcgaacgctccgtacaggtgcgggaacgccggctcctgctcggggaaccaccagccgtgctcggcatggatgtagcgcgggttgagcgtcgggtcgatggtcaccttctggcggcagcgcccctcggtgttctcgatccatatccactcgccctcggccaggccgtactcctcggccgtctgcggcgacacctttacgagcggcatcggatggaactcgcgcatggttgcctgctggcggttctccgaatggaagaactcgtaggagcgcgagccgttgatgcagatgaacgggtactctttcttgaactcggggtcggtgagccaccgcttggccgaaagcgactccacgtgctcggccaagggagggatgccccaggcgccgaacgtggcgtacggcacgagctcgatgcgcccggtgggcgtcgcgaagccgggcaggccgtcggcgcgcagcaggcccttctcgtacttgcggtacgtggcgcagaagtcgtcgtactcgtagccgcccttgcgcacgagcgcgtcgaacgagcattcgccgtcggcatggtgcttcttccagaagtcggtgtgcacgtcctccacttccaccatgcccgccttcgagcggccggcgctcttgtagctcttgccggtctcgggatcgtagaggttgaagcccacatccaggtagtcctgcagcagcgcctcgagcgtgggccagcgcttctggaacagctccgggttgagcttgttgcccagggccacgatgagctcctcgtcggacttcgcctcgtaccattcgctcacggccttcatggcgcgcagcggcgtccaccacacgcgcatcgagtcgcgctcggccgtggtcttgagcggcaggaagatgtcggcgtaggccaccgccgtgggcgtcaggtacgggtcggccaccacgcagaactccacgttctgcagcatcttgtgcacgcgcggcgccgccgtggccgagcaggcgatgccgttggagccctgcgaccagaacatcttgatggggtacggctcgcccgtctcgaacgcacggttcacggcgtcgcagtcggccatgccgatgaactgcacgcatccgggatgcacaaggtccaccgtgagcttcttcgcgaacgtgtcgggatcgcagtagagctgggccgtggcgtagccgggattgatctcgaagccgttgcgcacgaggatgttcgtgcccggtttgtcgatgttgccgcacacgctcatgaggttcgacaccgtctggcacagctggatggaatcgacctgcgtgtcgaaggcgaggccccactggatggcgccgcgctcggcgcccgcgtagaagcgcgcggctgcggctatgtcctccgccggcacctggcagatctcggcggcccagtcgggcgtgaactgcgccacatgctctttgagctcgtcgtagtaggcgcaccagcagtcaacgaactcgtggtcgatcaggtcctcggccgtgatcacgttgagccacgcgagcgcgagcgccaggtcggtggccgggcacagcggcagccagtacgccgcgcgggctccccaccaggtgagctgcgggtcgatggagatgaactccgtgcccatctgcatgcacacgttcagccaatggcccaggtaaccgtccgcgttcgagcgcagcggctcgcagccccacaccaccacgacgtcgggacgctcccattcggggttcgcgtaacggtcggcatggccctcggaggcgtccacaatggggaaatcgccgatgccggcggccgtgccgcacgtgcgcggcaggtagcacgagtaccccgagaagccgatggcgccgatgttcggcgtgccgaggcacgccccgcccagaaacggcacccaggacgagatgttgcgccccgtgccatggttcacgaagatcgactcgcggccgaagcccgcctcgtcgaggttctcgtgtatccagtcggcaatctcgtcgagcgcctcctcccaggtgatgcgctcccacttgttctcgccgcgctcgcccgcgcgccgcagcgggtacttggggcggtcggcgtagttcacgccctcggccaggttcaggcagcgcatgcacagacgcccgttggcgcacgggtcgagcgggtcgccctccacgcgctccagcttgccgtccttcgtgtacatgagcacgccgcacgaatcgtggcagccgggcgccgagtacgtgtaggtacgcgtgacggtgtagccgtcctcctcccactgccactcgccctcgtggtaggcttcgcggtcgatgcccttgaggaactccccgtagtcgaacagcataggccctctctcctctctcgtctcgggcttggcgcgacgtgcgccgcgcttcggccctcgatgcgaacgataggaaaaagcgccgtgcgtttcatgaggtgggagacgctaaaccgcagagtaaggtctggaggattagggccgtgggcggggcggcgaccgcgatcaggcccggtcgtccaggatgtcctgcagcatgtccccggcggccgccacgtcggtgtcctccaccaggtccatgagctcctggcgcgagtggacgcccgtcttctggtagatgttgtagatatgggccttcgcggtgtgcgacgatatgatgagtttctcggtgatgtagtcggcgttcctgcccttcgccagcatgcccagcacctcgcgctggcgattcgacaggccgtaggtgcgggcgacgatctcgcactttatatggaagatgcccgggcgagccaccgcgccctcgcctgtcgcaggctcggcaccgtcttcgcccgccgcctcgaggcggcggatcggcgcgccgccggtcgtggtggagccggcgccctcgtccgtcgcgccatccgcaccgcgcctgatgcgcgtctcgtccgggtagttgtcctcggtcatgacgaacgacgccgagaatatcaccagcatcatgaacaccaccacgacggcagcagaggtcgtctcgtaggtgaaaccgcccatcccctcagaggagaacccgaagaacgccagcgccatgcccaccgcgacccctgcgaggcagatgaggcgaccgaacgagaacgccctgatgggcgacaggtcgcacagcgccacgtgcttgcacatggccgacagcgagcaggtgatggggaacagcgacccgcagagcagcaggacggcgaacacgaacttgagcgccgggggcgcgaacatgagcgggaacgccaccaccgcggcgaacgggaggaagaaccgcatggtgatcgtctcgttcacacggttcttccgacaggcatcgaccaggaggaacgcgcacgtgcccaccacgagcacctcggcgatcgcataggcccatgaatgcacggactcggttgacagcaggcagcccaacccgaacccggcagccatgcccgccgttgccgtggccaggtacgatctccacgccacgcggttgcgcgcatccgacgtccttcggtccaccaccggctgtcggcccagatggaagaatgcgaacacgcaggcgtaggccgcgaacgccaccaccgggaacacgagcgcgaagaagaatcccatctcggcgcccgcaaacagcagacccgcgcacgccgcgagcgcgcagcagaagatgcccaggacgtaggtcttgatggacacgtggaagttcaggcacacgaactccccgtacaggccgtagaccaggccgaagccagctcccagcagcacggacgagaaaagcgtccacaagccggacagcgcaagccacaatcccgccgccccggccgccgtgcagacgagcgccagggcgtactgcacccgcctgcggcgcgagaagaagtccgagagggcccaggtgatggccaacgccgccatggcgcccagcacgaagcagagatgcggcccgcccgccgcccccgcagcggcggcggaggggacgaaggccgacgtgcccagcatgaggaacgcccacccgtagcaggcgacggttcccaccaatccgatgagcatgcgcggattgacgagcagccactggtccttgccctcgtcgcccatgagctcgcgcacaaattccgtaccgtgatccagcttcaacgatttcaaccccctgaaagtcatcgccgaactaccgcccgacccctcgcgccttcgggcctggcgggcgcccgaaggcgtccgcacgttatatcatgacctcgcaatcctccgcaaaccgctcataatggcgccctctccgccgctccccgccgtcgtgcccagcataaaccacccaagccccgcacccgcgaagataaggcatggggtattaggctcgcgccgaagataaggcgcgccttcgcatggcgtcccgctgccaccgcaccttccgcgtgcactctcttccgcgctcccgcgtgcccggcacggggcttggcgaaatcaggcgccacgccccacggcgccgcggcccgccgcgtcgaaataggaagcccgacggcatgccgcccgcgagcgtcctccctagaatctcgggtatgcgacaagcccgcgaggccgcgggccgcatgggacgagaaaggagcaccatggccgactaccgagagtttctggaaaagctcgaccgcaaggcctaccacgaaggggaatggcagtggcaggaggacggctacaccgtcacccgcacgacgcactggtcgccgccgggctgccacatgggctgcggcgtgctgctgtacacgaaggacggcaagctggagcgcgtggagggcgacccgctgaacgccgtggccaacggcaagctgtgcatgcgctgcctcgaccttcccgaggcggtgaaccaccccgaccgcctgaagtaccccctgcgccgctttggcgagcgcggtcaggaccggtgggagcgcatcagctgggacgaggcctacgacgagatcaccgagcgcgtgctcgccatcaaggaggagcacgggtccgaatccatcgtggtcgtgcacggcaccggccgcaacatcggctggcaggtcccctacttcgcgtcggcctgcatggagacgccgaacgtctccacattcgggttcaccggcttcgcctgctatctgccgcgcatgatcggcacgtcggcgaagtacggcgacatgatcatcgtggatgcctcgcaggcccaccccgaccgctacgcgaaccccgattggcaggcgcccggcgtcgtcctggtgtggggcaacgagcccatcaagtccaacgccgacggctttttgggccattggctcgtgcagtgcgtgcagatgggctcgaagatcgtctccgtcgatccgcgcctcacctggtggggggcccgcgcggcgtactggctgcccgtgcggcccggcaccgacgccgtggcggccatggcgctgctcaacgtggtcatcgaggaagacctctacgaccatgacttcgtggaccgctggtgctacggcttcgaggcgctcgccgagcgcgtggccgacaagacgcccgagtgggccgcgcccatctgcgaggtggacgccgaagcgctgcgcggcgccgcccgcctcatcgccacgtcgtcgagctgcgcctgccagtggggcctcgccttcgagcagcagatcgccgcgctcggcgtgaccgaggccgtggccgacctcatggccatcaccggcaacatcgacaacccgggcggcaacgcgctgtaccgctgcgccttcctcatcgagaagcgctacggcctgggcgacgagtacatcgatccggaggtgtacgccaagaagctcatacccgccacctcgggcatcaacgagtcaaacatcgtttcgtgcgccgacaccgacgccatcctggcagccatcgagacgggcgagccctaccccatccagatgttctggatccagagctccaacgcgctggcctgcgcctccatggacccggcccgcacgcgcgcagccctcatgaaggtgccgttcatcgtggtggccgacccgttcatgacgcccacggcccaagcggttgccgacatcgtgctgcccgtggccatgagctgcgagcgcaattcctgccgcacctggtggacgcccgtgcgcaccatggtgaaggtgaccgactactacgaggcgaagtcagacgagcagatctgcctcgaactgggaaagcgcatcaaacccgagcactggccgtgggccgacgacaaggaatggtgcacctggtacctcaccgaccagctggcgcccggcggcaccgagtacgaccgcacctgggaggacacggtgcagaacccgagcgagaacagctgcaacggcacggcgtactgggactgggacgccacgtaccataagtacgagaagggcatgctgcgccccgacggccagccgggcttcaacacgcctaccgggcgcatcgagctgtggtcgttcggctacgaccactggggcgtcgacccgctgccctaccacatcgagccgcccgagagcccgctctccacgcccaagaccttcgaggagttcccgctcatcctctccggcggcgggcgctccttcgagttcttccattcggagcaccgccagctgcccaccatgcgcgagttccaccccgacccgctcatcatggtgagcccggaggactgcaagcgcttcggcgtgcgcgacggcgcgtggatctgggtcgagaacagccgcggcgcccgtttcaagcagaaggtgaaggagaccattgaggtcatgcccggccgtgtgcatgccgagcacggctggtggttccccgagcaggacggcgccgagcccaacttctacggcacgtacgactcgaacctcaacaatatgaccgaggcgttccgcacgggacagggcggcatcgggtccgccatcaagagcatgctctgcaagatctaccccgtgcaggaaggcgacgtgctcccgcacgaggtcatcgccgagaaaggcaacttcgcgccctacgagcccggcaagccctaccagccggtcgaagagcccgtcgtcacggttatgagctaggaggctcgcatggaaggcatactggtcaactacgagtactgcacgggctgccactcctgcgaggtggcctgccgcaacgcccgcggcctcgcggccggcgagttcggcatcaagctcgccgaggtgggaccctaccgctacgagacgcccatcgacgccgacacgccgtatgagtgggtgtacaaccccaccctcacgaaggcgtgcgacctgtgcgcggagcgtaccgccgcaggcaagatgcccgcctgcgtgcaggcctgccaggcatggtgcctgtaccacggcgaggtggaggagctcgtgcggaagatggacggcaaaacccgctgggcgctctacactcccgcaggaaagtaaccgcaaccgatcgccggcccccttgccccggcggcaagggggcctcacgtaaggagggacatcatggagatcaacctgaccatcaggggcgaggagaagttccgcgcgttcgtcgaggagcacgcccttatcggctacgatgccgcgagaagcgacctcgaggagcagttcctcgccgacgagaaggccggccgctacgtcctggcgcccgagaaggccaaggacggccaagagcacgtgaagccctgcatgggcgtgtgcctggcctacgacgcccagggaacgcagctcggcggcggcaaggcctacctcgacaagggccaggaaccggcccgcaaggacctcacgatcgtgttcatgtaggagcatcgcggctccctgccgggcattccgcatgccgggaacccgaacgtgcgacggccgccgtcccccccctgggacggcggccgtcgctttcctcctgccaaacttgcgcagcgctacgagggccgctgccccgcctccaaaatcgggtgctcccgcgcccatcgcctgccgtacttctccagctcgtcgttcacgacggcatcgttccatgcgcggaagcacttgccgctcgggatggaagggtagaagcgccctgccgggcagtacgcgtcgatggcgcggcgcacctccgccctgatctcctcctcgccgatgtgctcgatatccaccgccggggcgtcgatgccgccgatgatggccagctcgcctcccgtcctctcctgaatggcggggaggtcgttctgcggtatggccccctgccagatgtcgatgcctatctctaccatgtcctccactatgggttcgcagatgcagtcggcgtggtgcacgaacagcatgccgcactcatgcgccgtcgccacgatctcggcatgcagaggcttgatcagctcgcgccacacggtgggcggcaggaacaggttctgcttcgatccccagtcgtcctggaagaacaccacgtcgggctggaactggcgcgccgcctcgcgtaggacggcaatcttgtagtcggctatctcgcgcagcatgtccgccatttcctcgggctcctccagataggcgcagaacgcgtcctccatgcccatgaggaaatgggagcgctcgaacagcccctgtgccgagaagagccccacgaaccgctcgctgcggtccgcaccggcggcgaattccctcgccgcgctccagtcgagcccctcgagcgcgggcaccttcagctgctcgcgccatgccgtgacgtctttcaccacggcgttctccggcgtgacatgggggtgcttgccgggagagccgggcagcttcacgcataccgtgccccagctgtcccgatgctccaaaccgtcgtcgggcacgctatccgccgcgaagacggggtccggcgcgaagtcgagcgccgccatgaagtcgccgtagtagtccggttgctcccggttgaatatcgccatcatgttctctctgggtttcatgtgtcctcctcgtttgaaaagccgcatcttccggttacctgcaaggaaatcctcctcgaagccccgccgtcccgccctaccgtgcgtagaactcgtcaacggcagcaaagaacgcgtcgatgttctccagaggtgccatcggcggcacgtcgcacccggtggagatcacgaagttgggatagcccgcgcatgcctccagcacttcgagcgtcgccgcgcgcacggagtccggcgtgccgttgcgcaactgctcggcgggggctacgttgcccatggccacacggtcggcgggaacgagcggcatcacgtcggccatggagatggcgttgccgaagtggaaggcggcggcgccggtgtccacgatggagtccatcatcttggggaccccgccgccgcagttgtggtagaccacggcgaacgaatcggtttgcacctctttcacgatgcggcgcacgtaggccgaggagaactcctcggcgagatcgggcgacagcaggcccgcaagcggctcggccaaaaccacgccgtcggcgcccgccgcgcggaaggcgtccgcgtaggcggccacgaactcggcggccttctcgagcacggcatgcacgagctcgggttcctcgtagcacatcaccatgacctcggacacgtccatgagccgccctgccagcgagaacgggcctatggcaccggcgagcaccgggcggtcgtcgatcaagggagccaccttggctatggcctccacgtacaatcccgtgcgccctacacccaccgcgggcaccacgatgccgctggggtcggtgtcctcgtcgacgagcgcgcccaccaccgtgggaacctcgtcgtcgctcacgaccgtctccgccccgaacgcctccgcctccacggacaggtccatgaacgacaccgaggccgccgtcgggtacgtctgggcgatgaggcgcatggcctcggcctggtagtccgacgacccgatgaggtcgcgcaccgtgatgcccataagctgcacggcgggaaacgacagcaccggcagcgcctgcttgcttcccgacgcgatcacgtcggcgaaccacttcctcatatccataggatgctccccctccttccgggcgtgccgcccacctcttacgctcccaccagctcggcggccttgacggcggccgcgcccgcgtcgggcgtgtacgcatcggcgcccacctcgtcggcatacgcctgcgtcaccggggcgccgccgacatgaccttcaccttgtcacgcaaacccgcctcctcgatagccctgatagtcgctccgatctcgggcatcgtggtggtgagcagcgccgagcagcacacgatgtcgacgtcgtcgtgctcctgcagaaagctcacgaacgcctccggcgccacgtctacgcccagatccgtcacctcgaaaccctttccctctatcatcatgcgcacgaggttcttgccgatgtcgtgcatgtcgcccttcaccgtgccgatgacagccttacccaagggctcagcccccgcctcggcaagatgcggcttgagcacctcggtacccgcggacatggcacgggcggccaccagcatctcaggcacgaacgcttcgccagcgctgaagcgatcgccgatgacgcccatgggggcgatgagcccctcgtcgaggatggcctgggccgccaccccctcgtcgagcgcctgctgcaccaacgggccgacttccttcctcttgccgcgcatcaccgcgccggcgatctcctcggtcgttgccatgggtacccctcttcctctcgcagtcgacagtcaatcgcaccagtttaggaaggctcgtcgaaaagggcatggggcgggaatgcttattttctccgcccgcgtgcgcggcgtccgcaagcgcgtcgggcacggcgcccgaagttgaccgacagggtcatgcgggagtgctgatcttgaacagcgagccccaatgctcgccgccgatgcgctaccatggcgcttccccgagaggaaacggaggggcgcatggacgtggccgtgcaaagccgggacggcgggatgaggcatatcgaggcggaagccgggcagaccctgctcgaggccctgcgcaaaggaggcgtgacgatgttcgccccctgcggcggcgccggcacctgcggagggtgccgcatcctcgtgcacgatcgggcgggcgcaggctaccgccttgcctgccagaccatcgtggaagacggcatggtggccgtgcccgacgacctggggaccctggcggtggcaggcggggatgctgcggctgcttcggagcaggcggtgtcaggagcggacgacgcgcggttcgggctggcggtcgacataggaaccaccacgctggcgttgcacctggtggatctcggctcccgaagcatcgtcgccagcgtcggaagagtgaacccccaggttgcattcggcagcgacgtggtcgcgcgcatcgggtccgcctcgtcggcggaagggctggaggcgctctgctccgccctgcgcgacgggctcgacgacgcgctcgccgccctcggccggagcgcggggcgggacatcggctgggaagacctcgagcgcgtggccgtggcgggcaacaccgtcatgaagcacttcgcggcgggcatcggccccgagcctatcggcgcctaccccttcgcgccgcctgcgctcttcggagaggagcgcaggctgtggcaggcagacggccgcacgggccgtcccgtgcgcgcgtacctggcgcccgtcgtggcaggatacgtgggcggcgacgtgacggccgggctccacgtcgcagggctggcgcgctcgcccaagctccagctgtatctcgacatcggtacgaacggcgagatggcgctcggcagcagcggccgcatcatgtgctgcgcgacggcggccggccccgcgttcgagggcgctaacatagcgttgggtatgccggcgttgaggggcgccgtgagcgccgtctcgatcgaggacggcgagctcaccgtcgcgaccgtgggcggcgccgagccggtcggcatctgcgggtccgggctcttggacgccgtcgcctgcctgctcgacctgggcatcgtcgacgagaccgggcgcctgctcgaagccggggaagccaaccgggacctcgcgcgccgcctgggccgggtgcagggccagcgggcatgctacctcgacgccggaaggcgcgtgtacctcacccagggcgacgtgcgcagcgtgcagctggcgaaggcagccctacgggcgggcatggaaacgctgatggacgagatgcacgtctcctgcgacgacgtgggccgcgtcgcgctggcaggcgggttcgggtcgcacctccgcgcggcgagcgcagcccgcatcggcctgatacccgcagccctcgagcacaaggcggtgtcgctgggaaacgcggcggggaaaggggcggctgcggcgctcttcccggaagggagggcggcactggagcacctagccgcctcctgcacgtacctcgagctctcgacgagcacggcgttcgccgcccgctacctcgatgcgatgggcttcgaggcatgacgcgcacggtacgcgcctgccccgatgcaggctgcgcaggcgggacggatgctcgcagggcctccctcgccagcgagctggcggcgcaagcccgcacccggggcttcgccctgtgcggctgcgcgcctgcggcgagcctgtacgtgaatcccgcagtccgctccctgtgcgcggaggaccgctgccgatcctacgggcggaactggacatgcccgcccgcgtgcggcaccctggacgatttcgcggcagccttggcagctcgcgccgtcgccctcgtcgtgcaaacggtcgagcagctggaggacgagttcgacatcgaggggatgatggcaacggagcgggtgcacaaggagcggttcgcagcgcttgcgcaagacgccctcgatgccttcgatgccggtgaaaggaggctggggccaggcatcccgcgtcccctgcccctgtctgccggcgcatgcacgctctgccccgcgtgcagctgccccgacgcgccctgccgccaccccgatcgagcgctcgtctcaatggaggcggcgggcctgatggtctccgaagcatgcgaggcggccggcctgccctactaccacggcctaggcaccatctcctacaccagctgcatcctgctctgacgctccgccccgcaaacaggagcaccccgacccccgtcggccaagccgcgcaagcatccctcttttcacctttgcacaagcaccctctttataccgccgcccacgtgagtacgcacgatacgaaccgccccgacgcacctcggcatcccagagattggccgcacgccggacggcccctttcgcgcgcacaagaacggccggccgaagagggggctccggtaaaaacagcccccatcaaaaaggagccagcccaaaggctggctcctcctcctatcatttacgatgccgctgtgccgctactcggccgcaggagcctcgttcgggtccttcacggtgatgtccgcgtgctcgaggagccacttgttcgccttgatgcgctcggccgcctcgcgcagcgcgaagccgcggcccgactcctccatctggcgacgcacgccctgggggttctgcgggttcatggcagcgcaggcctcctgcacgtcctcgtcgctcaccaccaggccctcgtggcggaacagggcgtccagcgcgtagccctgcacgagcatctggcgcgtctgcatcatcatcatcatgttgaactgctgctcgccgccctgctgctcgacgaactggtcccacgtcatgttctgctgctccacctcggcgcgcatgttgttcatgaggttgcgggacatggactcgtacacctcgtcggcgatgctgcccttgaagcgcttcgccagctcgccggcggccatgttgcgcttgtagttctcgtactcgcccgacagctggcggttcaggccgcggcggatgtcgtcgcgcatggcggccacgtccttgtacatgggcatgaacttcgccacccaggcgtcgtcgatgacgggggcgaccttcttctggatctccttgaccgtgacggtgcactcgatggtctcgacgatctcgttgccctcgtcgtcgatgccggggccctcgaacgtgaaggtcttcgtctcgcccacgtccatgccgatgatgttctcgtcgaagccgtcgggcatgaggccggcgccggcggagtacgtgcgcgcgtcggtggtcaggccgggcagcttctcgccgttctcgtaggactccatggccaaaaggcagctgtcgcccttgcgcacggggtgcgggtcgtcggccacgaactcggcgtagcgctcggcaacctggttgatctgctcgtccacctggcgctcgtcgatcgacacctcctggatggtgatggagaccggctcgtaggacgtcagctcgtagtccggcttcggcgtgaggtgcaggccgaactggaacgtctggccgcgcttgagcgccgtcttgggctcgggctgcggcgggaacgcggggatgacgccgaccttgtcgatggcgaacggcacgagggcctcgaccgcctggttcatgacgaccgagtccaagtccttgatgcccatgcgctcctcggctgcctgggccaccgtcttgtccttctcggggcgcatgcccatctgctgggcgaacgcgaggtgcgcgttgttgagcgcgttgctcacctcggccgtcgaggcaacggcgtcgatcagcaggcggccgtcgtcgagtttcttctgcgtgactttcatcttggttccgtctccttcttacgagcactgcggcacagggcgccgggtggaggcggaaacggcgtgccgaccgcaatgcgatacgtgcagaaaccgtgcacggacgttcccctccaataccttgctagcttgcaattgtaacgcacatcgtcgcccaccgcgacgagatgcccgcaaatataaggcgatgtccaaccggctgccctccgggaaaaagagactgcacggcatgcgttccgcgaagcccaagaagggcgaacgaggcgcgggaggtctattcagggggttcaacctccgcgcccgcgcggcgcataccgtgcagcacgccccgtactatacggaaaggccgctccaagtgcattataccaaggggcctattttgcgccccggcctcataccagacgtaccagattcccggccgcacgcggggaaacgcacgccataggccctcttggaagaccccatccggctccgtcccgcgtccctgcaaccacgctgccgccgcaccccttccctccgcacgcccccgcttccacggcgcccgatacgacaagacccccggcagagagaggccgggggtctgcgttcgccgttgaagaggaggtcggcgaaaggggatagctacttgccgggggtgccgggggcggcagggggcttcggggcgcccggggcaccgggagccttcggggcgccgggagcgccgggcacgccgggagcacccggggcgccgggcatgccgggggccttcgtcgccttggcgccgcagctcgggcacgcgtccaggctggggtccacttccgcgccgcacttggggcacttgatggggccgttcaggtcaaccgctgctggtctgaagcacatgaggagatcctttctcttttatggtccgatcggtccgtcgcgaaaccccgggccctgctcgggcttgcgtggtcttcgaggatcggcccggagcgtgcaggggggcttgcgccgggccgatcctcgaagcgaactcgacctctcgcagactactctagcgttcagtaccggggccgagcatcccctataagcgcttaaatagttgaaaagccgtaatacctatggtctgattcatttccacgacctgcggttttgctcccaaagtagttttgcggaagaagtttccaagaatgagccccgcagcaagcacccccgcgcaggtcgcccccctctcacctgccgaacgtcaagcgggtcgcgcttgcggagagcgcctcggggcggcgcttgatgcgagttccgcacgagccgaacgccccagcggggcgttcgtgcgagccaggactgcccgagcagcaagcgccgccccaaggcgctccaggaaggattactcgttggacttcaggctctccaccatgtcgacccgcgcgagcttgcgcctcatggccagcatcaccagcacggtgaacagcatggtgagcagaaacgctatcacgaagctcgccgcatggatggtgcggccgaacatcacctggtccacttccgccgtcaccaccacgaagccctccatgaaaacgccgagcacgagcccgaccgcgcacccgatgaccgacaacagcatggtctcgcggtagatgtaggcgctcacctcgcgcggcgtgaagcccagcaccttgagcgtggctatctcgcgctgccgctcggtgatgttgatgttcgtgaggttgtacagcacgatgaacgcgagcgccgccgcagccaccacgagcacgatcacgatgagccccacgctcttgagcatggacttgtacgcgtcgatcacctcgtcgttgtaggccacggtcttcaccccatcgatggcgcgcaccgcatcgttgaactgcgcgcgctccccggcgtcggagctcgtcacggcgtagtacgtggagaatgccggctggccgccctccatgcgcgcgtactcgcccgggccgatgaacacgtagttgtagatgtagttctccatgacgcccgtgaccgtgaggtcgaacgtcttgtccgtggcgttgcccatctcgtcctgctcggccaggcgcaccgtgtcgcccacgcccactcccagctcgttcgccagcttctcggccagcaccacgccgtcatcgccgatggacagtggctcatgccccacgcgcgtgcgcacggtgaggaagtcggcaaggccgcccgggtcctcgggcaccaccacggacgcatgaacgtcggccttgtccggcccgctggccaccatgctcgcgctctgcacgcgcgtggaggactccacggcgccgcctgcgcccagcaggtcgtccagctcctgctgcgacgcggccggcaggtcgtcctccgtggtcacgacggcgttgtagtgcacgatctcgccgtactgcttgtcgatgatgtcgttgatggcgtcctgcaggcccaggcccgtgagcaagagcgccgtgcagccggcgatgccgatgaccgtcatcacgaaccgcttcttgtagcggaacaggttgcggaacgtgaccttccacgagaacgacagccgccgccatagcggggcgatgcgctcgagcaggatgcgcttgccggctttcggcgcgcgcggcagcatgagcgtggccggccgctcgcgcagcgtggcgaacgcggccgcccaggtggcgacgagcgtcacgcccacgccgagaccggccgccaaccccgcgagcccaagatcgatgggcagcggccccctcggcacgaagtagatgatggcgtaggcctcggagatcacggcgggcagcacctgcgagagcaccgcgatgcccagcacgcttcccgtcacgctggccacggcggcgtacagcaggtacttcgaggcgatgcgcgcgcggctgtacccgagcgccttgaacgtgccgatgagcacgcgctcctcctccaccatgcgcgtcatggtggtgagcgccacgagagccgccacgaggaagaagatgaacgggaacacctgcgcgatggagtccacgcggttcgcgtcggactcgaagctcgccacgccgtagttctggtcgcggtccatgacgagccacgacgggttctccaagtcgtcgatcttctgctgcgcgtcggcaatctgacgctcggcatcggcgaactgcgcgtcggcgtcggccttctggcgctcgtactcggccagaccgccctcgtagtcggccctgccctgctcgagctgcgagcgcccgctcgctatctgcgccgccgcctcgtcgagctgctgctgcgccgccgcgatctgcgcgtcggcctgcaagcgcgcggacgccaggtcggcggtgccctgctcgacctgcgcgacggcggcgtcgaactgcgccttctgggcgtcgaacgcggcctgctgggcgtcgagctccccacgcgccgcattgaccgcctgctgctgcgcctcgagctcgccgcgagcttcgtcgagagccgcctgccctcggtcgatctcgtccttgcccgcatcgagaacctgcttctgggcttccagcctcgccctgttctcggcgtaatcgggattttcggggtgggcctcgttcgcatcccacgccgcctgccaaagcgccatgttctgctgccactcggccgccttcgccgacagggcgtcctgccggccctgccactcgccccaccccgccgccagcgcgtcggctccctgctgccactgcgcccaggcgtcggccagctgggcctgcccctgctcgatggcggggcgggcggcgtcggtctgggcgcggccgtcggcgagctgccgttcggcctccgcaagctgcgcctcggcgctcgcgcgctggctcgccagctcggccacgccgctatcgtaggcgccctgcgcgtcggcgagcttctgcttgttctcggcgatggccgcagccgcctcgtccagctggcgctgcgcgtcgttgagctgctgctcggcatcggcccgctcgcgctcgtagtcggcgcgcttctcgtcgagctccttctgggcgttggcgcgcagcccgtccgcgcgggcctgctcgcgcgcgggggcgagggtctctatgcggtcctctacctcgtgcacgcgctcgaagtaggcgtcgcttcccgagaactcgcccgccgcccccgccaccgtgacgaaggcctccgtgtagggcagatccttcgagaaatccgattccggcacgtacatgaactgctgcaccgagcccgacccgagcgaggtggtgcccatggacgtggacgacacgtagtacgaggagtgcacgtagcccaccacctggtacgtgcgcgtggccagcacgtcgtccacgtcctgcgagccctcggtgatctgcaccgtgtcgccgatcttcgtgggcgtgttcatcaccttgtcggccgacagcacgcactcgccctcgcgcaccggccacgagccctccacaagaacgggccggttcaggtagtcggcggcgccggagaccgcgttcacgccgtcgcccgtatcgctttccgcagcggcggcgggcagcgagtgcacgcggatagcgtactgctcgtcgttcaccgtggccatgacgtccgtctcgtaggcacccatgacctgcgcgacgccctccacgccgcgcagggcggccaggtcgtcgtcggtgaggccgagcgtcgacaccacgcggatgtccatgaggttcgtgccgtcgtagaactggtcggccgcgagcttcatgtcgggggccgtcatgcgcagccccgcgtagaatcccgtgcccaacgccacgatgccggcgatggccaggaagcgcccgagcgagtgcgtgacggaacggaggacgtccttgttgaatgcgcccctcaagcccgctcccctaccactccaggacgtcggccgacagcggggcctcgttgatctcgacgcccgccacgcgcccctcgcggatgtggatgacgcggtcggctatggccgtgaacgccgagttgtgcgtgatgagcacgacggtcttgccggtgtcgtagcacgtgtcctgcaacagccgcaggatggccttgccggtatggtagtccagcgcaccggtgggctcgtcgcacagaagcagcttcgggttcttcgccagcgcgcgggcgatggccacgcgctgctgctcgccgccggagagctgggcggggaagttgtccagccgatgccccagccccacctgggcaagcacctcggccgcatcgagcgggtccttgcagatctggctcgccagctccacgttctccaacgccgtgaggttctgcacgaggttgtagaactggaacacgaagcctatgtcgtagcggcggtagtaggtgagctccttgctgttgaacgcgctgatttcgcgcccgtccagcatgatggtgcccgacgagcacccgtccatgccgcccagcatgttcaggagcgtggtcttgccggcgcccgagggccccaccaccaccacgagctcgccgcgctcgatgtcgaacgtcatcccgtcgacggccgcgacctccacctcgcccatcgtgtacaccttgcgcacgtcgcggaactccacgaatgccaaatcgatccctctcttcaccctcgcagctgcgtttgccccaccatacaccaaccatcccgtccgcgcacgcgagcatacaaactcgccatgcgccccggccctcccccaacacgaaaagcgccccgcagatgcggggcgctccaaagcttcggacggctcgatagcctagctggcgaacagctcgatcgtgtcgccttccttcagcgtgaccatggccttcttccaggtgcgggtctggcccagctggtagcggacgcgcttgggcttcggcttcacgttcagcgtgttcaccttcacgaccttcacgttgaagatggcctcgacggcctgggcgatctccaccttgttggagtccttcgccacctcgaacgtgtacgtgttcttctccatcatgtcgtagctatgctccgtgatgatggggcggatgataacctcgcggggatccttcattatgcgagcacctcctcgatgtacttgagggcgtcggccgtcaccacgagcttcttgttgtcgatgagctcgtaggtgttgatgtcggacaccgggatgatgttcaccttcgggatgttgcggaacgacaggtacgtgttcaccgcgtcgtcggcgatgacgagcgccacgcgaccctcgaggccgagcgccttcatcgcggccacggcggccttcgtggagggcttctcgaactcgaagtccttcaccaccaccagctcgccgtcggccagcttggcggagagcgcggagcgcatcgccagcttgacctccttgttgttcacgcggaacgcgtagctgcgcggatgcgggccgaacacggtgccgccgccggcccactggggggcgcggatggtgccctggcgggcacggccggtgcccttctggcgccacggcttcttgccgccgccgcgcacctggccgcgggtgagcgtgttgctcgtgccctggcgccaggccgcgcgctgcgagcgaacgaccgtgtgcatgacggtcatgttcggctcgatgccgaaaacggtagcggcgaggtcggcggaaccggccttcttcccgctcgcgtctttgatctcaatcgtggtcatttaaactccttattactttcgatccacgtttacgccatgcggacgcgaacgatgccattcttgccgccggggacggcgcccttcacgaggatgaggttctggtcctcgtcgacgcgcacgacctcgaggttcttcaccgtcacggtgtcgcagcccatgtgacccgggagcttgagccccttgaacacgcgggacggcgtggcgcactggcccaccgagccgggagcgcggtggaagtgcgcgccgtggccgcccgggccgccgcggaagccgtagcgcttcatgacgccggcgaagcccttgcccttggacgtgccggtcacgtcgaccttcttcgtctcggcgaacgcggcgaccgtctgctcgtcgcccacgttgtactcgccggcattctccacgcgcacctcgcgcaggtagcgcacgggagccgcgccctgcttctcgaagtggcccttcatgggcttgttgaccttcttctccttgatggcgccgaagcccatctgcacggcctcgtagccgtcggtggccttcgtcttcacctggcagaccttgttgggctcggcctggatgaccgtcaccgggacgacgcggtcgtcctcgccgaagatctgggtcatgccgatcttcttaccgtagattgcgttgatcattatcgcctgaccccctttacagcttgatttcgatgtcgacaccggcggggagatcgagacgcatcagggaatccaccgtgttcggggtgggctccaggatgtcgatgaggcgcttgtgcgtgcgcatctcgaactgctcgcgcgaatccttgtcgacgtgcgggcccttgacgacgcagtacaggttgcgctccgtcggcagcgggatgggaccggacaccttggcacccgtcttctgcgcggtatcgacgatgagcttcgtggactggtccacgatctcatggtcgtaccccttcaagcggatgcgaatcttctgattagccacttacttacctccgttatgcttcaggtcgcgcgcgcttacgcgttcccgccggccttgctgataatttcctccgccacgctcttgggcaccggctcgtaggagtcgaactgcatggtgtacacagcccggccctgcgtgccgctgcgcaggtcggtggcgtagccgaacatgttgcccagcggcaccttcgcgctgaccacgatggcgttgccgcgcttctcctggccctggatcataccgcggcgggaggggatgtcgcccatgacgaagcccgtgtactcctccggcgtctcgatctccacggccatgaccggctcgaggatgacggggctggacttgcggagcgcttccttgatggccatggaacccgccaccttgaacgccgcctcggaggagtcgacgtcgtggtacgagccgtcgacgagttccacgcgcacgtcctcgaccgggtagcccgcgagcacgccggagttcagcgcctcctggatgcccttgtcgatggaggggatgtactccttcggcaccacgccgcccacgatcttgttctcgaacaggtagccttcgccggcctcctgcgggtacatgttgatgaccgcatggccgtactggccgcgaccgccggtctggcgcacgaacttgccctcggcgttcatgacctccttgccggggcgctcgcggtaggcaacctggggcttgcccacgttggcctcgaccttgaactcgcgcagcaggcggtcgatgatgatctcgaggtgcagctcgcccatgccggcgatgatggtctggccggtctcgtggttcgtggacacgcggaacgtcgggtcctcctcggcgagcttctgcagcgccacgcccatcttgtcctgctcggccttcgtcttcggctcgacggcgatgtcgatgaccgggtcggcgaactccatggactccaggatgatggggtgcttctcgtcgcagagcgtgtcgcccgtggacacgtccttcaggcccaccacggccacgatgtcgcccgcctggcaggcatcgatgtcgacgcgctggttcgagtgcatctgcagaaggcggccgatgcgctccttcttgtccttcgacgcgttcatgatgtaggagccggaatccaggctgcccgagtacacgcgcaggtaggtgagcttgcccacgaacgggtcggtcatgatcttgaaggcgagcgcggagaacggggccttcacgtcggagggacgctcgtcctcggcacccgtgtcggggttcgtgcccttgatggccgggatgtcaaccggggagggcatgtagtccaccacggcgtcgagcagctcctgcacgcccttgttcttgtaggacgagcccacgaacacagggtggatctggcaggcgatggtgcccttgcgcagggcggccttcagctcctcgaccgtgacctcctcctccatgagcaccttctccatgaggtcgtcgtcgcagtcggcggcggcctccagcagctcctggcggcgcagctcggcctcctcggcgaactcggccgggatggcgtccatgggctcggggtaggtcatgcccttgtcgtcggccttgaagtcccaggccgtcatcgtcacgaggtcgatgacgccccagaagttgtcctcggcgcccatgggaacctgcgcggccacggccggcgcgcccaggcggtccttcatggtctggatggcgttgaagaagtcggcgcccacgcggtcgtacttgttgatgtaggcgatgcggggcacgccgtacttgctggcctggcgccacacggtctcggactgcggctgcacgccggccacggcgtcgaacaccgcgacggcgccgtcgagcacgcgcagggagcgctcgacctcggccgtgaagtcaacgtggccgggcgtgtcgatgatctggaagcggtactccttgccgttgtcggcaccgccggggtacttccagaagcacgtggtggcggcggccgtgatggtcacgccgcgctcctgctcctgcaccatccagtccatcgtcgcggcgccgtcgtgcacctcgccgatcttgtgggtcttgcccgtgtagtagaggatgcgctcggtcgtcgtcgtcttgcccgcgtcgatgtgggccatgatgccgatgttgcgcgtgtcttgtagagacattttagccatagactgggtcccccttagaagcggtagtgcgagaacgcacggttggactcggccatcttgtacaggtcctcgcgcttcttcaccgacgcgccggtgttctcggcggcgtccatgatctcggcggcgaggcgctccttcatcgtgtgctccttgcgcttgcgcgagaagtccacgatccagcggatggcgagcgtcgtcgaacggcgggagttgacctccatcggcacctggtaggtggcgccgccgacgcgcttgggcttgacctcgagggtcgggcggacgttgtccatggccttcttgaacacggccagcgggtcgccgccggtcttctgctccacgatggcgaacgcaccgtagacgatgccctcggcggtggccttcttgccatcgaggaggaccttgttgatcagctgcgtgaccaaacggttgttgtactgtgcgtccggctgaacttcacgacggactgctgctgcacgacgcggcatgtatttctccttctggttcctgcgcgcttccgggcggctcttcgtcccgcccattaggccgccgccccacgccccctttgggcggaagcggccttagcggcccgcgcgtcttatcggttgcttacttggggcgcttggcgccgtaacggctgcgggcctgcttgcggttgtccacggcggcgcagtcgagcgcagcacggatgaccttgtagcggacaccggggaggtccttcacgcggccgccgcgcaaaagcaccatggagtgctcctgcaggttgtggccgacgcccgggatgtaggccgtcacttccatgccgttgacgaggcgcacgcggcagaccttgcggagagccgagttcggcttcttcggcgtggttgtgaacacgcgggtgcacacgccgcgcttctgcgggttgcccttcagggccggtgtcttgctcttgtcgaccgtctttttgcggcccttgcggaccagctggttgatagtaggcaaagcttctctccttttacctcttgcttgttccgattacctttatatagatagggaatcgcttctgcggtgcctccctgtgcgctcagctgattcgcacaggaaaacatacgcccacgtgggacgcgaacgagaactttatcatcgcccccgcagcttgtcaaacgccacgcacccgggagtgtctatatctcccacctgcgtttcgcctgatgaaaggcatcgggcgccgttcgataggcgaaaggctccacgtaatctcgaatttattccgcgtcgtcggccgccgcggcgcgcacgcgcaggagcgcgcgcatgtcggccgggtcgaggcaggccacgggcgcatggcgcagcagcgcccggtccgacgtgaccacgtagtcggcatcgacgcgcgcggcggcggccagcagcaggtcgtcctcgaagtcgtcgtggaggtcgcggtaggtcatggcgcgcagggcctcgttctgccccacgggcacgatcatcgagagctccatgacgttgcgcacgctcgaccacgctgattcgcgcaccgccgcggcaaagagctcgtcaacgggcttgccgtgctcccgcagataccgcttcgtctcctggcagaggaggaagaaaagatcgggcatcgttgccgacgaggtgtgcagcacggcatcggctgccgtcgcctccgccatgaaccccatcgccgcttcatgcgcttcgggcctgcgctcgaggaaataatcgatccacacgttcgtatcgacgagcagcttcagcggcaggctcatggcagacccctctcggacgccttctcgaggtacgcctcgtagcgcagatcgtcgtagtaggcctcgtggacctcgtcgtcgtcgagctccctcttcggcttgccgaagtactcgtcctcgcgcaggtcctcgcacgtgatcttgcgcggcgccggcacgggcaggccgttgtcgaggaagaagttccgccagatggcggccccctcgcgcacgagggccaggcggcgctgcacctcggcgtcgtgctcggcgccgcgcgcggggcgcatgaacgcgggcggctcgcccttctcctcggcgtactcccacacggcgcgcaccacctgcgagggcgtgagcccccatcgggcgaacacctcgtcgccgcgagccttcgtctcctcgtcgatgcgcacgttcatctgcacggcggccatggcgcctcctctgcggtcgggctgcttgctgctatatagtatagcacagacaaggctgccggccatgcgccgggagggcgccccgccggcgccgctacgcgacgccttccctcaccagcgcctccacgaggcgggcggtgccctcgaggtcggccacggagatatgctcctccggcgagtggaaggccgccatgcccacgccgagcgtcacggcgcgcacgccgcgggccgccaggacgttcgcgtcggagccgccgccgtcgtggcggaagcaaggctccagcccggcggcgcgcgccgcacgggcggccgtctgcacgagggcgtcgtcctcgtcgtagagcacggcgccgtagctgaacgtccagtcgatgtccaccgagccgccgaagcgcgcggcagcctgctcgagggcgaccgtcatggcggccttctgcacctcggcacggtcggggtagagcgagcggcactcgccgcgcagcgtgcacgcctcgggcacgacgttcgtctcgcgcccgccggctatcacgccgatgttcgccgtggtggcctcgtcgaggcgcccgagcggcatggcctcgatggacgccgcggccatttgaatggccgagacgcccgcctcgggcaccacgcccgcgtgcgatgcgcggccgacgaacgcggcctccagcgtccagtggcagggcgcgcccgtgatgacggtgccgggcgcgccgtcggcgtccagcacgtagcacggcgcgcccgcgggcagcgcgtccggcgcgagcgcgccggagcccagcaggtgctgctcctcgcaggtggtgaggagcaccgtgacgtcggggcgcggcgcgcccccctccaccaccgagcgcacgccctcaaggatggccgcgatgccggccttgtcgtcggccgagaggatggtgtcgccggccgagcgcaccacgccgtcctccaccaccggctcgatgcccgcgcagggctgcaccgtgtccatatgggccgacagcaccacgcgccccggcgccgttcccggcaggtgcgccacgaggttgcccgtgtccgcccccgtctgcgcggccgagtcgtcgaagcgcacggagaagcccagtccccgcagctcgtcggcgcagcgtgcagccatggcggcctcgcggcgcgaggggctctcgatgcggacgatctcgcagaacaggtcgagcaggcgggtggggttcatgggctttcttctctcttcctcgatggtttcggctcatcgtgctcgcgcggcgcgcgaggggcacggcgttcgcggcggcaggtcccggcagctgcggggccgccggccgcccgtcacgcccccaggatcttcgcggccacctgcttcttgcggctcaagacgcccggcatccaggtgccgccctcggcggagcagtcgatgttgaacacgcggttcacggtgcgcaggttgccctcgcacaaaaactggctgccctcggccaggatgtccgtgaccatgagcagcacgaactcgtagccgcggtcttccctcaaacggcgcatgtaggcgcgtatctcgtcctcgcgcttcatgacggccggcaggtccaccgtctcgtgctgcgcgatgagcacggtggagtcgcccagctggaactccttggaatcggcgcccacgagcttcgcgacgggcatgttgtcctcgccgccgcggcacctgaacacggccaggccgaacgcggtggggtcgacgccggccacgtccgccaggaagtccacgatctcgtggtcgacgtaggtggcggtgggcgacttcaggatgaccgtgtcggtcatgacggccgacaggagcacgctggctatggcgggaggcatctccacgcagtggcggcggaactccatggccacgatggtggcggtggagcccacggggaggttcaggaacttgatggggttggccgtcatgacgtcggcgatgcggtggtggtcgacgatctccacgacctcggcctcctcgatgccgttggcggcctggcgcgtctcgttgtggtccacgagcaccaccttgcgccgcgggtgcaccgccacgtcggagcgcgtgacgatgccgatggcgaacccgtcgtcgtccagcaccacggcctcgcgcagggcgctggccatgaggtcctcgacggcctccttcagcaggccgtccttgtccagctccagcacgtcggtctcggtgatgtcgctgaccttctgccccagcgacgcgatgaggtcgcccgccacggccatctcgttcgcgccgccctcctccagcacgtcggtggccgcgatgtagcgctcggctatcatgcgcgtggtgatgaggccccggtaggtgccgtcgtcgttcgtcaccacgagcgcgcgcacgttgtgctggcgcagcaggcggcccgccgcgagcagcgtggcgtcgtgggcgatggagatgggatcgggcgtcatgacgtcggacacgcgcgcgtggacatggcccacgacctcgggcagcggcaggccgttctccttcaggatccagctgctctcggggggcagcggccccaggcgcgccggcacgtacacggccggcgcctccccgtcgcgcgcctcccggcgcgccagctcgttcttcaggtaggcgtagcccaccgcagcgcagatggaatcgttgtcagggttcttgtggcccaccacgatgatgggtgccgctgtggccatgctcgctccttcgccgcacggcgccccgggcggggcgccttcgtctgccgttttcatatcggaatagggccgcgcgggcatgcccgcggctttgatgggaaacagtatagcgacggaagggcgggcgctgcggttccgccatcgtttcgtcgtggaatctcacgaaatgagcggtcggcggggcgcgcccgcgcggtatgcgctaccatggcagcgaaacaggcgccccgccgatgaaggccgggcaaccggagcccgccctgccccgccgccggcgcaggagcgccaggaggacagtcgaaaggacgcgcatggaaacgctcggattcgccgacatcgtcggccccatcatggtggggccctccagctcccacacggcgggcgcgctgcgcatcgcgcgcatggcgcgcagcctgctggcggcggcgccggcgcgcgcggagttcacgctgtacggctcgttcgcgcacacgcagtcgggccacggcaccgacaaggcgctcgtggcgggccttctgggcctcgcgcccgacgacctgggcgtgcgcgactcgttcgagcgcgcgcacgcggccgggctggccttctcgttcgcctgcgaccgcgaggcgggcgtggagcacccgaacacggtggacgcgcgcatcgtggacgcggaaggcggcgtgctggaggtgcggggcgtgagcgtgggcggcggggcggccgtcgtcacgcgcatcgacggcatcgacgtcaacgtcaccggcgagcacacgagcgtggtcgtgcgccagcgcgacgagacgggggtgctcgcgcacatcgcgggctgcttctcggactgcgcggtgaacatcgccaccacgcgcatgtaccgcacgcggcgcgggtccgatgcgttcacggtcatggagctggacggcccggtgcccgccgaggcgaaggccgccatcgagcgccaccccgccgtgcgcgacgtgcgcatcgtgcctgccgacgggccggccggacagccggcgggcggcaccgatgcgcgcgcgggagcggcgggcggcacggccggggccgccgagcaggccgaggagcgcttcgccgcctgcgacttcgcctcgggcgccgagctgctcgaccgctgcgccgagcagggcacgggcctggccggcgcgtttttggcccgcgagcaggcgctcgccgcgctcgacgggcgcacgtgcgacgccctgccctacgccgaccgggcgctcgccgtcatgcgggcctcggccacggagccgctgcgcgagcccgcgccctccatgggcggcctcatcggcggcgaggcgcgcgacgtgcggcgggcgcgcgagcggggcttcgcggcagtagacgccctgacgggagcggccatggagcacgcgctggccgtgctggagacgaacgcgtccatgggccgcatcgtggccgcccccactgccggctcggccggcgtcgtgccgggcgtgctgctggccctggagcaggagcgcggcctggatgccgccacgctgtgccgcggcctgctggccgccggcgccgtggggtacctcatagcccgcaacgccacggtgtcgggcgccgagggcggctgccaggccgagataggctcggcggccgcgatggccgccgcggccgccgtggagatggcgggcggcacgccggcgcaggcgctcgatgcggccgcgaacgcgctctcatcgctcatggggctggtgtgcgacccggtgggcggcctcgtggaggtgccctgccagaagcgcaacgccaccgccgcggccacggcgctcgtgagcgcgcagatcgcgcttgcgggcgtgggcaacctcgtgggcttcgacgagacggtggccgcgatggatgccgtggggcgcgcgctgcccttcgagctgcgcgagagcgccctcggcggcatcgccgcggcgccgagcgcctgcgcctggtgcgccgcgcgcgcctaggcggacgcccgcgggcgccgtccgggcgcaaacgaacagcacggcctccggtcctccgggcagaacgcccggaggaccggaggccgtcaaagaatcggcgggcgaacccgaagggcgccggtccgggcgaagcctacagcggctcgctcacgcgcacctggcacgggcgcagctcgccgtcgggctgctcggtctttcccttgcggcaggggttgtagcacacctcgccgcagatcgtgcaggtcaccggctccggaagggccagatcggtcaggtcgaaaccgcatttggtgcacgggttgggcttcgagaagtgctcgaggtcgaccgcgttgaacatgccgcattcggggcacttcaccggacgcttgcgcggcggccggcagccgccgcagatgggattgcacgaccagcacattagcggaagtcctcgccctggtcgcctcccaagagcttcgcctgctccttcaggtgctgagccttctcggcggcggacacgaagtcctcgggggcatcctccacctccagcagctccacctcgaacgtcaggctcttgcccgccagggggtggttcaggtcgaacgtgaccaggccgtccgttatgtccagcacggtggcgggcatcggcgcgccgtcctcgctgctcgacagcatgatgcgcttgcccaccttcacgtcgttcacgggaatctgctcgagcgggatcttcgccacgtggccctcgaggtactcgccgtaggcgccgtactcgtccaccgtgaacgtcttcttctcgcccgcctcgttcatctccaggatggccttctcgaagccgtcgatggccatgtccatgcccgtttggaacttcatgggcttctcttccgtggcgaagccgaacaccgtgccgtcatcgagcttgcccgtgtacaccagggttaccgttgagccaagttgcatcgtcttgatctccttctttcgcattgacaggaacgtaaaaccgacggcagggcgcggcagggggttcctcgcctgccgcgcggccgcgcggcgcgtacggcgccgaggacccgcgagccgtcgggtcgccttcgattggatgccgcaggagggacagaggccccgcggccggccttcaggtaagccgcgcatcccgcaaggccccggcatgccgggacgcagcacgacgaacgggctgggaacgaatgaccgctttgacagttctaccgagtgggctccattgtagcacacggacgccgcccctgcccgccgtgccggcgccaatcaacgccgatcggcgcactcgcccgaccggcccccgcccttacgccgggtcggccgtgttgaggcagatggcgcaccgctgcagcccgtccaccatctcctgcgtcggcggctcgccaaggggcgcgcccgcctccatccggccgtcgagcgccaggcaggagcgcacgaacgcctcgtcctcgggcttgagcatgcccagcctccgcgcctccctgaaaccgtcttccacgtccgtggacctcgccacgcgccagaggtgcaacgtcaccaggcgcaccgagccgcggaaccgcctctctatcgaaacctctgccataccgtcctcgcttccgttttccgaccacagtctaccacgaacggcagctcgtgccctataatggaaagccgcagataacgaaggagaatccccatgccgaatgaagcccttgacgctgccctcgcccagtacggggcggtgggcgcgcgctacgtggcaacgctcgaggacaagggcctcgtgttcgccgaggagggtgcgggcgcgcagcgccgcgccgagctgcgcgcccagctggcggcgcgcggcgtgaccgtgcgcaacgcgggcgccagcctgagcgcgggccacctgtcccccgcctgcgtggagtgcacgggcaaccgcgggtcggagacgttctccaccacgttcaagtgccaccgcgactgctacttctgcttcaaccacaaccagcccgactacgagcggttcttccgcgaggggtgcccgtgggaggagggcgtggcccgggcggcggccgagaacgacgcgctcgcctgcgtgggcctgaccgggggcgagccgctgctcgacctggagaacgccctgctcttcctcgagcgcgcgggcgagctgtggcccggcgcccacaagcgcctctacacctcgggcgaccttctgaccgcagaggccgccgcgcgcctgcgcgatgccgggctcgacgagatccgcttcagcgtgaaggacgacgacgcccccgagcagcaggggcgagtgatcgccgccatgcggctcgccaagggcttcatcccctcggtcatggttgagatgcccgtgatccccggagcgcgcacgcacctgcagcagctgttccgccagttcgaggacgtgggcatcgacggcatcaacctgctggagttctgcttccccttctgcaactgggacgagttcgcccggcgcggcctcacgctcaagaacccgccgttcgaggtcatgtacgactacggctactcggggggcctggccgttgcgggcagcgaggagctggcgctcgagctcatgctgtgggcgctcgacgagggactgagcttcggaatgcactactgctcgctcgagaacaagcaccgcagcgagatgcgccagaagaacgagcgcgccgcgcatgcgcacccgtgcgtcgcgttcgacgagggcgatttcttcctgaagacggcgaaggccttcgggccggacgtggagccggtgcgcgccgcgctcgaggcggagggctgcacggacttcatggaggaccccgaggagggctcgctcgcgttcccgccgcgcttcctcgagacggcgcggagcgtccggcgtccagacggcgagccggtacagatccagagatgcttcctcgtgtacgaggtcggcgaggacggcggctacctcatcgacgtcgccttgcgcccggcgtaaggccggcgccgacagccggcgcgccgcgcactacgggaaaggcccgcgcctgtggcgcgggcctttcccgtatcgaagcttgcagatcggcccccgaagtgcgggcccctcgtgcgcgtgggcgcctagcaggcccgcttccagggcgcgcccgccgggttgagcttgcggcgcgccgagagctcgtcggcgaacatgatgcagtagcgcaggcccttgagcgtgacgtacaggcaggctatctcatgcttgccaccgtggttgaacacgtcgtacgtcagatactcgcgctcgatcatgggctcgtagagggggctgcccttcaccttctccatcagcaggttcgtggactcgcgccccagctcgtcctgcttgagggagatgttgtacaggatatcctcctgctcgggggtcagccgacccaatttttcgatctcggccctgatgacgtcttcggttcccataagccctcgtctccttgtgcggttcggtgcccgcgttcccaatggttcccacagttcccaatacggtgcccgtaaggctttcccgccagcaaagcgctgcaggcgccgtagtgctcgccattctaaaagaggacccacttcaagcaacaagcgagtcctccttttgcctctgcgcaagcttagtgcttaaagcttagctcaccggcttgatgtccttgaagctgccgcccaggccaagctcgccggcaccctcgttgccggtagccttcgtggaggtgtagccgccccaagcgcgagcaatgtacttgtccttcacgaagaagacgttcagcttcagcaggtccggcttggtcagctcgaactcggccgcggcctcgtcctgggtcttgccctcggccatgagagcgttcagcttgtcggctgctgcctgaggatcgagatccatgaactcatcatgcgtcattgtgccctccttgtcagtcgttacagcgtcgtggccgccgtccgcaaaggcagcggccacgacaatcatagcattatcggcttacagctggaacaggaccatcgggcggtcgaactccgccatcttggcctgcatctcctcgagcgtgccatagtacatggacgcggactcctcgacctgcacggccaggggacgctggccggccttgtcgccgccggtgccccagtgctcggagaagatcgacgtcgggcacgggatgtagaaccactcccacgcgtcgccgtcggaaccctcggccttgcggaaggggccgacctcgacctctttgatgccgaactggtcgagcgggaggcccagctcttccttgcaggcgatctctgcggcatggttgccggagaagtaggtgtaatcaacgagcaaagcgtatttctggtctgccattatcgccacttcctttcgggttagtcttggtccaggctacggacgcggcggacgttgcacatgacacccttgtacggggcgccgaaaccgagcttgccaacgttgaagtgcggcaccaggctgttgaagttggacttccacacgccgaacaggttgggctcctcgccgtcctgctcggggaaccaccagccgtgcgcgcagttcaggatgccgggcttcatgaccggggtgacctcggccttgaagcgggcctcgccgaacatgttgtacacctcgcaccagtcgccgtcggtgataccgtactcggcagccgtctccgggttgatctggacccacggccacggatcgatctggcgcagcgacggcacgtgacgatgctcggagtggaacgagctgtagcgacgcgaaccggacgtggtgatcagcgggtactgaccggcgaagtcgggcttgctgatggggctgtagttcggctcctcgtagtagggcagcggatcctcgccccaggattcgtacaggatagagtaagcttcgatctggcccgtgatggtgttgaagccgggctcgccgtcgaagcggagcaggcccttctcgtacttctcgtactcgaagccatgggcgccgggctggtagagaccctcctcgcggaactggttccagtccatgccgagctccttcagctggtcgctgtagaagtcctccacggcaaccgccagggcgtcgaggtcgagggacttgccgtcggccggcttgtaccacggccaccaggacgggttgaggcgctggccgaacatgaggcagatctccacgtcggacttgcactcgcccacctgcagagccttgttcatggggcccatgaacacggtgttgcggccgtagtgcgtgagcacgatgccgttgtgctcggcccacgtggccatcggcaggaagtagtcgcccacggccatggccgtcggggtcatggtcaggtcctggaccacgacgaactcgagcttctgcagggccttgtgccaacgcttaggctgcgcggagcacgtcggggtgaggaagttggagctgttgaaccaacccatcttcagggcgtagggctggtcggtctccatggtgttcagcgtctcgtcgggctgggtggtagccatgccggtggacaggccgggccacgccgccgcgccgatgcgcttctgccacacgtcgtcggccatggcgccacgctgctccatgcgccacttgccgagcagggccgacggaggaccgagggtcaggccgccgggacggtcgatggagccggcgagggcagccaggacgatgaacgcctgggacagctgcacgccgttcttgttctggtcgaacgcgaggccccacgcccagccgatcgggcgctcggtaccgatgatgtgcgcgacgcgcttgatgtcctcggcgtcgacgccggtgatctcggcaaccttgtcgacggggtactcggccgcgcgagccttcatgtcgtcgaggccgtagatccacttctcggcgaactcttggtcgtactcgcccgtctcgaacatgaggttcatgatggcgagggccagggccgtgtcggtctgcgggcggacctgcaggttgatgttgccgtcgtgcgcgcccacccacgtgatgcgggggtcgatggagatgatcttcgtgccaagcttcatcaggtcgacgaggcagtggccgaagaagccgtcaccgttggagggcaggggctccttgccccagaccacgatccacttcggcacggtgtagcgcgggtcctggtagctgcccggcaggtgaccggcgtagtcgagctcggggtagccggcgcccagcacgtagtcggagatggagcaacgcgggccgtagcaggaccaaccggactgcgtgtagcagcagttgggcgactgcagcaccgagaacgtcagcgcatagtagaagatgcaagcctcgcggccggtgccgccgaagaccacgatggactcggggccgtaggtgttctggaagtagcgcaccttgtcgcagatggtgtccagggcctcgtcccacgtggtctgaacccacttgtccttgccgcggtcctccgggttgcgcttcatcgggtggatgatgcgcgaaggcgcgtacgtgtactcgcgcagcgcgaggttcatcgcgttcacgcggcccgtggtgatggggttgtcgtcgtcgccctcgatgcggacgagctcgccgtccttcgtgacaaccttgacgccgtatcccaccgggtggcttcccggaggcgaccacgtgttgctgcgggttacgacagtcccgtcttccatcacggtttgccactgtttaccgtatgccatgttctccttctttctacactctcactcgtgtttcggtagaagcatctctgcgcttgtcatcgcgcgaaacctcgtgtagatcctcgtgctggggaccacccccttccgtggtcgcggcgcccgtcccctttgcaggcgccgcttaagcatcgcgtccgcttacgcggtgggaggcttgggagcaccgggggccgcgggggccttcggggcgccgggggccgcgggggccgcaggggcgccgggagctgcgttcggcagcggcttctcgccgttgatatacggcgagaagtcggccttgcagaacgggcatgccttcaacgtaacgccggccatcatctggatggtcttgccgcactcggggcatttgttcatgccgccgctcgcacctgcatctgctggtctgaagcacataggggaatcctccgtctcatttcttcggccggctcggacggcacatcgcaccgtcttgctgccaaccccttgccataatgttcgtcagcgaaagcctgacgggaaacagcttagttgcccgggcgggaggggcatcgaatcacggggacaattttggggatcataccatcgtccccggaggttgattttcgtcaacccaagaggttgcggtttattatattgcctgatcattggcataattttgagtttagccgcccggcgtcgaaccgacggccgcaaccgctgaaaacagctcttggcaccgtgtcccaggaggccctgcggtataataaagcaagcgaaaacgcgcctttaagggggatctgcattgaagaacaacaaggtgtacctgccaaccgatgccatagcgcgccacgaggatttcgacgtgtggtacgccgacggtgaaaccttcctagagcatcaagggagcgtggtccaaagagagcgacaaggccgtcatcttcggccgcatgggcggggagatggggcagatcaagcccgaccacaaggccctcacctactacctgaagctcgaacgctgggaatacgtgttccacacgctccacctgttcaagcactactacgtgaacgggatgaagtggcagatcgacgggtcgttgacgaaccctcccttcgacttcgtcaacgaggaggactcccagaaggaagtgcatgtgcaggtggtcgatttcaagggccacggcccgtgcttcgaggtcagggccaaagacgtggccaagctgcgcatcgccgtggccgccgtcatcgccatggccatcaaggaggagtaccggggcttgagcgagggcctgaagaacccgaatgcctcccggctcgagaaagcgaagaactggctcgtggcggacaagggcatcccttacgaccagctgcccgacctggattaacgcccctggcagggcgttggcgccctgcccgccccccccccgcctcgcaccgacacgcaacgcaaaagaagccccgccgccttgtttccaaggaggcggggcttctgcaatgcggggcccggcgaagtgccggccgggcagcttgaacgctgcccggccttaccttgcgggcgaaagcgatcccggcacgcgagggcttacgccttcgtcgacgcctcgtcgcccaaggagccgagcgaagcccgggcagccttgttcttcgccgactggatgccgccgaagatgaagaagtacaggaacgggaggagcaggccgatggccatgagcggcagcgcgtagggctgcttcgaccagttcggcacgatgagcgggcaggcgatgcagaggatggcaaggacggccacgatcaccaacatgacgatgaagcgcatgttgccgtccttctcggaattgcccatcctctcctcttcggccgcgagctggtccatggacttgccggcggtttccttcacgaacatgaccgtgcagatgaagcccagggcgaacgggacgatgagcacgagcacgaccatcgaccagttggtggcgccagtggcggtctggaacagcgccatgccggcgatgccgccgagcacgatggaggaggcggagccgccgaagcgggcgaacgcctggcaccaggacgtgccggtgttgcggatagccgtgggatagctctcgggcatgaggggctggacggccgtgatggcgtagttcagcgcgaagccgaagagcagcatgagggcgatgcacaggcccatgttgttcggggccacgaagatggagcacaggatgatggccacgatgcagaacagccaggcaccggcgaggttgcgcttgcggccgatcttgtcggacacgaagcccaccgcgatgttggaggcgatggccgccacgttgttccaggtctggagcgcgacggagtcagcctgcgagtagcccaggcccacgaaccacgtggggatccaggcgttcatgccgtacacgcagaactggccgacgaagtaggcggaccagatggcgcaggtcgccacgatgaacttgctcgagaacagaaccgacgggccggtcttggcgggcttcggcggaacgatcagcagagcggggtcgtactcgtgggacgtgtggcgcgtggcctgctcgatctgggtgaggcgcttgcaggccatctccttgttgccggagttggcgtaccagtgcggggtctcgtgcatcgtgaagatgaggatgatgccgtagatcagcgggatgccgccgatcaggtagcacaggcgccagttggcgtacatggtggcggtgccgccatcggccagggcgtaggtgacctggttggtgaagtcgccgagcagcggtgtggccgcgttgcagatcgggttggcgatgaggccggccagaacccagccgacgaccatgaacgccatgccgaacgtgacgaagacgccacgctgcttggagggcatgctctcggagaacaccgtggtgaccaccgggatgcaggagcccacgccaaagccggcgatcaggcggaacgcggcgaagaacgccaggtcgttcgcgaacgcctgcggcagcgtgaacaggccgtagaacatgacggcagcgatcagcgtcttcttacggccgatcttgtcggacatgatgccgccgacggcgccgccgagcaccatgcccagcaggccccacgtggtcagcgagcccatgagcgcgcccgggttcgcgttgtcgggccagaacgtatgggccacgaacatgttggtcgaattgacgatcatgaagtcgtagccgtcgaagatcatggcaaaggccagcagcacgaacacgacccacgtgtgcttgctgatgccgatggagtcgatgacttctgagatcgtgaactcttttttatccatcagtccctccttttgaggtaactcgtatgataagaagccggatcgtccgtccgtcgcgcaacgcgacgtgcggcgccccagcgcttacgcttccccttcgcgcagtggcaagactggaaccgcaacgcaccttcaggaaattacggacgcttcagtattgcatgaataactgatgcttccgtagtttcgaccaccgtccctcaacgatgatcgccacctgccttcaaggccgtgccgccctccagaagaaacgactgcgcccatcccccttccacgattctctttcccgatcgcgttatttccttttgcgcaagagaccgaaacggccgaaagcatgcaaaagaaatatccaagacgaagggtacgaaacgcgggtcgggcggtcatcctctcgcaggtacgctttaccgacggggcatcgacccctgggatcgatttatcgaaggcgccttttccggcattcgcccccggcaacggggcccggcaccgcacggggacgcggcggggcggcggggcgcgccgggcagccggaggaaggcggcgggcgcggcagggggcaggcggcccgcgccgcgccccggccaccgcgctgcggcacccggtcgcaggaaaagccgccctcgcgcgcgaggaggattcccgcaggcgcccaggcgctgccctgcacgatgtaaaagtggttcgcaacatcgtcccgagaggttgatttctatcgtcctatgggcatagacggcccaataaccccaggtaaggagacaatgaacgggtttctcccgtttgaaccccgccccagaaacgtatatagtggaggccatcggtcgaatcggcgcggcaaacggcgccgacaggggcagcggcactcgcagtaacatcatccgaccgagaagactatgtccgatgatcacctcgacaggggaatgtgaggatactaacgctcatggccatcaacctcccgcgtatcagcatcaccgtagacgacaatcgaggcatggggacgcagggggagctaagtatcctttccctgggcttcggcatacaccaggcctggatctatgccgccatgttcgggacgaactccatcttccagatgcccgctcccgaaggccttttcggccacagcagctccttcgtctcgtacgtcttcctcatctccatcgtggtgttcgggctgtcgcttctgttcgccgccatcaccgaccagaagctcctcaagctctacaccgccaagcgcgtgctgttcggggcgggcatcctcacctcggcgggcacgttcgccgtgttcgccgccacgctgcccggggcactcggcatagcggccaccgtgttcgccggcgtgtccacgggcatcggatcggcgttgctgctgctgttctggggcaccgcctactcgcgtcatggcgccgccaccatcgtcatgaacacggccgtggccatcgtcatagccgtggccatctactccatcgcgctccacgtggtgcccgcgcccttctcgggcgtgctcaccgcctgcctgccgctgctggagctgcccatcctgtggcacctcacgccggtgagctacgccgtgcgccacgccatacccatcttcaacccgctgccggtgcacaaagggccgttctgcctgcgcttcgcgctcccggtgctgctgttcggcttcgcgttgggcgcgctccgctcgctgtccacgcaggtcatcttgccgtcgtccgacctcaccacgcagctgctggcgctgttcgccggcggtgcggccaccgtgctgctgctggtgaccacgttctccatcgacaagcgcagccactgggatttcctgttccggccgcttgtcccgttcatcgccatcacgctgttcttcctgccgtcgctcgcgctggacaactccatgatcgcggcgctcgtgctgctcaccggctacatgtgcttcgaagcgctcatgtgggtgttcttcggcgagctgtcgcaggagttccgcctgtcgcccatcttcgtgttcggcatcgggcgcggctgcctggccctgggctcgatagccgggtcgctgtcgatggccgaccccgcattcctgtcgtccctctcgccgttcggcgaggccggcggtgccgtgctcatcatgctggccatggtggtggcgtacgcgctgctgccccgtgtgcgcgacatcaagcgcatcgtggtgaagggcgggcgcgatttcgatgccatagagtccttcaaccatcagatagagagggttgtctgggcttcgcgccgcacgagcgcggacgcgtccgacgacggtgccgagacggaggctctgccgctgcccacgcccggaacgctcttcggcatgggctcggtgccggccgagacgccgtcagacctccccacctacggctcggccggcactcccggctggcgcgccgccagcataggaagcgcgacgccgtccaagctggcggcggacacccagctggccaaggaaccggcgaaagaggcttccaaggagccggacgcggcctcatccgaggccgagcgctcgcgcaaaagcgggcggttccgttcgcaatgcgaggtcatcgccgaccgctacctgctgtcacggcgcgagaccgaggtcatgttcctgttggccaaggggcacaacgccgcctacatccaggacaagctgtgcatttccaagagcacggccaagacgcacatcagccacatctaccgcaagctggacatccacaaccagcaggagctgctgtccatggtggaggaggcgcgcgacgagctttaggcgcggctatggctgcagccgcggcgagaccgcctcgcgggcaagggctctgcccttgccgccgaccggggccattcgccacgctgccgcaagggcagagcccttgccctgcactctacctgccagcctgtttacgagagatccaagtcagggcatgcggccaggtcgactgcctggatggcgatgcagctggggccgccctgcgtgatgaaggccgggccgagctcgaacaggccgaagcggcagcccgggaagcgctcctccaggtaggcgagcgcctcggctgcctggcaggggttgtcggcgtggctcacgcccacgtaatacccctcgcctaccccgcgtccctcgaagtcggccgcaacggcggcgatggccttcttgaacgagcgggcgatggcaagcttgcccagcctccgaccgtcgtcggtctgctccatcacagggaacgccttaaccaggtgagcgaacttggccgcaaggggcgtgagccggccgccgcggcgcaggtagtcgaaatcctcgggtatgaggcaggagcgcgcggtgcccatcatggcctccagccgccccacgacctccgccgcgccgaggccctgtgcagccagcttcacggcatagcacgcgagcgcacggtgcggcacgcagagcgtccgcgtgttcagcacgtgaacgcgctcggggtgccgagcctgatcgcgcaggccgcaggccatctcgtaggcgccggacaggccgtcggccatggccaggtgcaccacttcctcgtccgtgtcgtaagctgccagcgtgagcgcgggcggcggggaggcactctggggaagggctccggcacgcacgagggccaggaactcctccgacgagatatcctcgtattcaagccaggtagctccgtctatggacacggtcagcggaagcaccgccatgccgcgcctcgccccctcctccacggagaacatcacggatgagtcggccacgatcctcatgcgggcctgctttctcctcgtcgtcgtcagggtacgcaccgccccccgcggtatcgcgcacccccgttgaattccatcatgcaggatcaagccgcaacaagcaaggccgctgcgaaaaaagcgcgcgtcaccacaccgtcggcccctgccgcctaagcgccgatcttcacgatgggcgcgtagtccttcaacagcttctttgtctggcccgacttggcgaacttcacgtagagcgtgtcgccgtccaccttcgtcaccttgccgcggccgaacgtcttgtggtccacggagtcgccggcggcgaacgccattttcgccgcagccttctttcccgcgtcgggacgcgcgtacgcctcggcgcgacggtcggagcggccggcggaacccgaggcgctcgagcggccgaacacgcggccctcccccgcctcggcgccggagcccgcgatgccgcggcggctgccgcgcttctcccagcccgtgccgctgaagcccgccgaccccacgccggaggactggcgcagctcggcagggatctcctggatgaagcgcgacaccgggttcgccgacgtctgcccgaagatctggcgctgcgaggcgcaggtgaggaacaggcgcttgcgggcgcgcgtgatggccacgtaggccaggcggcgctcctcctcgacgctcgccgcgtctcccaccgagttcatgtgcgggaacagcgtctcctccatgccggccacgaacacgcagtcgaactcgaggcccttcgacgagtgcacggtcatgagcgtgaccgcgttgccgtcctccgccacggtatcgaggtcggtgcgcaggcgcacccactcgatgaagtccgcgagcgaatcgccccgcaacacgcgcgcgggggccgcatctgcagcctcgtcgtcgccctccgccgtaggggccgcgtaatccgcatcctcgtcgtcatgggtatccacgaactcgtccaccacgcccaggaactcctggatgttctcgatgcggccgcgcgcctcgtcggtgttctcggcctgcagggcgccgatgaggccgctcttgtcgatgacggcctcgatgaccttgcgcaagtcgccgccgtaggtgcgcgcctcgttgatcaggcccacgaacgaggccactgactggcgcgtggaggcgcgcagcgccgggtccacgatggcgagctcggccgcctcgatgaacggcatgtccatctcgcgcccgaactgctcgatgcgctcgatggtggtcttgccgatgccgcggcgcggcacgttgaccacgcgcttggcggcgatgtcgtcggccgggttcacgatgagcgtgaggtaggccatgacgtcgcggatctcggcgcggtcgaagaagcgcgtgccgcccacgatgcggtagggcacgccggcgcgcagcagcatgtcctccagcatgcgggactgggcgttcgtgcggtagaacacggccatctggttgtacgaaaggcccgccgagcgctgcttctctatctcgccggctatccagcggccctcgtcgcgctcgtcggaggccaggtacacgttgatcttctcgccatcctctgaggccgtgaaaagcttcttctgcttgcggtgctggttgttcgcgatgacggcgttggccgcggccagtacgttgcccacgctgcggtagttctgctccagcttcaccacgtgggcgttcggatagtcctgctcgaactccaggatgttgcgcagatcggcgccgcgccacgagtagatggactggtcgtcgtcgcccaccaccatgatgttcttgtgcccctccgccagaagctgcgtgatggcgtactgggcgtggttcgtgtcctggtactcgtccaccatgaggtagcggaagcgctgctggtaggcggcgcgcacgtcctcgtggttcttgagcagcaaataggcgtagagcaggaggtcgtcgaagtcgaaggcgttcgcggcgcgcaagcgctcctgcaggcgcgcgtacacgcgggcggccaccttccccaccgggtcggaggcctgtttctcgaagttgcccggcaccacgagctcgttcttcgccgtggaaatgcggttcatgagcgcgttcaccgggaagcgcttcgggtcgatgtcgaactcggccatgatctctttgtacaggcgcttctggtcgtcggtgtcgtaaatggtgaagttgcgcgtgaagcccagcttctcggcgtcggcgcgcaggatgcgcacgcacatgctgtggaacgtggacacccacatgccgcggcagcgcgggcccacgagggcgttcaggcgctcgcgcatctcggcggccgccttgttcgtgaacgtgatggccaggatctcccacggggccacgccgtggttctcgatgaggttcgcgatgcggtacgtgagcacgcgcgtcttacccgagccggcgcccgccagcacgagcagcggcccgtcgatggtgacgaccgcctcgcgctgcggcccgttcagggtttcgatgtcgattggcatgtgagcagtctcctacggatggaggtgaaatcaagcttccgtattctaccgcttttcccacagggcgacggacaaacgcgcgcaatctgcgcaagcgcccgtcccgctatgcgcacgcctcggccagctcgtcgagcggggcggcaggctcgtcgtcgccgggacggccgacgccgagggagtcgcgccacatggacagctcggcgccatgctccacgaggttcgcgcactcgttgcccgcgcgctcgaggccgagcagcagctggttgtacgcggccttgttctcgggcgcgcactggcggcttcccacgcagcggaagtgcgccttgcgcgccttgccctggcgcttgatgatggcgcggcggcgctcgtcgagcacctgctcggacgcggcgtcctggtcgctcaggaagcgcagcaccgctccgtacatctccgacaccatcgcggcgctctcggctagctcctcgcgcgcctcatcagagaattgcttcttggacgagaggcgctcgccgtagagcgcggcaacctcgccacagcgcgaaccgatgcggcccaccgcctccacgatggacatgaggtcggtgatctcggccgcctgccgctccgtcgtagcgccggcgctcagcagctccacggcgtagctcgcgagctcgccctccgcggcctccacctgcgcgcagtcggcctgcagggccttgagcgcggcggcatcccggctcgcgatggccccgggcagcgtctccagcatggcgcgcaccttgccgcagaacttctgcagctcctcgccgaacatgcggatggcgaacaccggctggccgaggatgttctcgtcgagcgtgacgagcgcgcccggctcccattcgccctctttgcccggaacgaggaacgtgacgatcctcaccatcacgcccagaagcgggagccacaggagcgtgcagacgatgttgaacgtggtatgggcgttcgcgatctgccgcgcgatgacgtcgagctcgggacccggcgtgatgagctgcacgaacgaggcgagcagcggcacgaaccagatgaacacgaacgcgcccgagacattgaacacgctgtgcgccacggccgtgcgcttcgcgtcgcgcgactgcccgatgcaggcgaggagcgccgtgatggtggtgccgatgttgtcgcccagcaggatggggatggagccttggaggcccagcacgctggacacgccgtcggggccgggctgggaggcgaagctctgcagcacggcgatggtggcgctcgagctctgcacgacgagcgtcatcaccgtgcccaccgccacgccgagcacgggaacgtccttcacctggtcgatcatggtcaagaacacgtcgctttgcgcgagcggcttcatgacggcgcccatcgtgtcgatgcccacgaacaggaggccgaacgcgaacacggtctggccgatgttcttcacgcgctcgtctttcgccacgaaccacacgatgaagcccacgaacacgatgagccagatgtagtcgctgatcttgaaggccatgagctgggccgtcatcgtagtgccgatgttcgcgccgaagatgaccgcgatggcctggcgcatggtcatgaggcgcgcgctcacgaagccgatggccatgaccgtggtggcgctcgagctctgcagcacggcggtggccacggcgccagccagcacgccgagcacgggattggaggtgagcagggacaggatcgacttcatcttggcgccggcggccttctgcaggccctcggacatcatgttcatgccgaacaggaacacggccagtccacccaagaggccgaacacggtttccatcggagcgttcacgcgggactccccttcgcttcatcggttgcagcgtcagtgcacgtgagtcgaaaggataccgggcggacggtaaggccttcgtcaagggaaggtaaagctcgggtaaagtttttacgaacggggcgcgtccgccgggtttccgcccgtcggacgcgtccgatcctttacacgatgcgcttgccgaagacggcggcgatctcgcggagcttggcgacgagcacctcgaactgggcgggcgtcagctgctgcgggccgtcggagagggccgcgggcgggttggggtgcacctcgatcatgagggagtcggccccggccgccacggcggcgtaggcgagcgacggcacgaggtcgcgctggccggcggggtgcgacacgtcgatgcacaccgggcacagcgactgcttgtggatcacgggcacggccgcgatgtccagcgtgaagcgcgtggccgtctcgaacgtgcggatgccgcgctcgcacagcaccacgttgtcgttgccctcggcggtgaggtagtcggtggcggccagccactcggcgatggtgcccgcgaagccgcgcttgtacagcaccatcttgtgcgactcggcggtcacctggccgatcttcttcagcaggctgaagttctggaagttgcgcgcgcccacctgcaggccgtccacgtaggagtgcacgagctcgcagtgcgcggagtccatgacctcggtgagcgtcttcaggccgtgcctctcgcccgcgtccttcatgatcttgagggcttcctcgcccaggccctggaacgagtgcgggttcgtgcgcggcttgaacgcgccgccgcggatccatttcaggccgaggccggccacgcattcggccacttcgtcgaactgctcgaccgactccacggagcacgggccggcgaagatggtgatctcgtcggagcgcgatccgagatcggggatggaggggatgttgacttcgctcataccgacggggtctccttcatgatcttgagaatggtggcgtagatctcgcgcaggttctcgttgtacaggggaccctcgttgtagctgctcaccttggcgaagatctcctcttcgcgcttggcgtcgtacaggcccagatgggcaccgggcttgagaccgcggatgaccagcgaatggccggcgcgcttgttgagcagcgcgacgatctggcggtcgatctcgtcgatcttggcacgatgttcttgaatctccgcaagggaggtgtctttctcagacatcggctttcctctcatggctctcatgcgataacgagcgtggccgcgccggaagcggcgtgcggccctcgtgtgcctgacatgatagcaaaagcggcgcgcccggtaagcgcgccgctgggatttagcgggaagaaccacggaagcggacaggtcgggggttcgccgagcgctcgcttgcggacgccgccctacggcagcatgcccatcgactcgaacacgaagtagcccagcaccagcacgcccaccacgatgcggtaccagccgaacgcggtgaagtcgttcttcttgatgtagcccatgaggaacttgatggctaccaccgacatgacgaacgccgtcacgatgcccaccgcgagcacgacgacctccgtcatggtcatggccaggcccgcggcgaagaacttgaggcacttcaccaggccccagccgaacatgatgggaatggccaagaagaacgtgaactcggccgccgcggtacgcgagcagcccgacagcatgccgccgatgatggtggcgccggagcggctcgtgccggggatgatggcgagcacctggaagcagccgatcttgagagcggtcttccagtcgatctcgtccacgtcggtgatcttgaacagctgcgcctcggcctcgtcggccacgtcgccgtacggctggcgcgcgtgacggccgcgcggcgcggcgaggaccgcctccgcctcgcgcaggcggcggcggttgcgacgctccagcacgatgaacgccacgccgtacacgatgagcatggccgcgacggtcaccttgttgtagaagtgctcgttgacccagtcgtcgaacagaagcccgatgatggcggccgggatgcagccgatggccaccatgccccagaggcgccaggtactcttcttctgcacgctcgtcttcttcggcgagaaggggttgagcttatggaagtacaggatgagcacggtcatgatggcacccagctggatgaccacgaggaagagcttgaggaattcgtcagacacctgcagcttcacgaactcgtccacgagaaccatgtggccggtggacgagatgggcagccactcggtgatgccctccacgatgccgatgagaaacgctttcaatgcttcgatgatcatgcgcgagtacttcctcgttgtccttcgatattactgtttgtgctggtaatggtcctgcagcatggcgatggccagcagggcgaccgagaggcacagccccatgagcacgaacttgggggcttcctgccccacggcgatggtggcgaacgccacgacggctatcacaagcgccgccagcttgcacaggtacgagatgcgccggttgaacgaggcatgcaggtcgcgcctgcgctcctcgtcgagctcgcctctgtccctgttcgctttctccatgccgggcattgtacacgacgccgaccggcgaggtcgaagaaaccacagggggaacacgggcggattgggaaggtgatcgggacgccgcggatgccaggaggacgctagttctccaggtaggcgcgctcgagaaggggcttcacctcttcgagctcgtcgagcgaggtgaggccgacctcgatatcgcctgttccccaatggcctttgcccgagcagtccctcaccaaactcgtctccgcaaccgtcgaggcgtcgagcgccaaatgaaggatcacccgcttctggttgacctctatgcacacgatgttgcgcaccttcttgatggcgaggtagagcttcagctcgttctccgacacgtcgtcgccgaacgaggccatgtaatggcggacctcgtcgaccacctcgcgcagcttctccggcgctccggccagctgctcggcgaatgtcttgtccacgtatttcttgccgagcgatccgcccgtcgtcgccgaaaccgacggagcggtcgacggcgcgttcaagaactcgaacaggatgacgtcgtcgctcttcgcgtagcggacgagccggatgttgcgattcatctgcttgattgcgtggagatcgtattttccgaaggagctggcgacgcagtacaccgccggagagctccagtctatcgagtcggcgacctgcttgccgagcttgtcgagcactagccgccagaagtccgcacgatgatccatgagccagtccaagtagaacagtccctgattgatgacgttctcgttggagtcgcgtttgtactcgaacacgatcggagagttgttctcgtcaataccgaggctgtcgatccgaccggcctggttctcgtattcccccgcatggttgatgacgtactctgtttgcaagaacctgatgccgaagaaggcctccatgttcgcctcgatgagctgctgcacgcctttctcgagctttgccggcttgagctcgatggcgcgcaccgaaggcttgatgttgaacagcttgatgtctcccattggattccccttcgcatggcgagtgatggctcaatttgattataaaggctgtcaggccggcggctcatgctgttttttgtgcagtgcgcgtatatgaagctgcgacctgcgccggagacggtgattcgtgtaagatgggacgctgagaagagagatgcgtactgcgggcgcctccgcttggccgccgcccgcgcgaaggagagccccatgcctgccaccccgtccagccagttggtcatcgtcgtcgatttcggagcgcagtacgggcagctgatcgcccgccgcgtgcgcgatctgcacgtgtactcggagatcgtcccgtgcgacgtcaccgcctccgaggttgccgcgctggcgccggcggccatcatcctgtcgggagggccggccagcgtgtacgccgaggacgcgccttccatcgatccgggcatcttcgagctgggcattccggtgctcggcttctgttacgggcagcagatcatggccgtgacgctgggcggcacggtcggccataccgacgccggcgagtacggggcggccgccttgacgcgccgcgacgagggcgcgtccgcgctgtacggcgagacgcccgtcgagcagacggtgtggatgagccaccgcgacgccgtggtcgaggtgcccgcgggcttcgcggtgacggcctcgaccgccacgtgccccgtggcgtcgatggagtgcgccgagcgccgtttgtacgcgacgcagttccaccccgaggtgcgccacacgccgcacggcgacgagcttttgcgcaactttctgttcggcatctgcggcctcgaggccagctggacgatggactccatcatcgacgacgccgtcgcagccatccgcgcgcaggtgggcggcgaccgcgtgatcctgggattgtcgggcggcgtggactcctccgtggtggccgcgctgtgcgcgaaggccatcggcaaacagctgacctgcgtgttcatcaaccacggcctgctgcgcaagaacgagcccgaagaagtggaagaggtgttcacgaagcagttcgacgtggacttcgtgcacgtgcacgccgaggatcgctacgccgccctgctggccgacgtcgtcgagcccgagcagaagcgccgcatcatcggctcgcagttctggaaggagttcttcgccgtggcggaggacctcgccgagggcggccggccggtgaagtacctggcccagggcaccatctaccccgacatcatcgagagcggcgcccgcaagaccggcggcaaggcatccaccatcaagagccaccacaacctgatccccttccccgacggcgtgtcgttcgacctgatcgagccgctggatcacttcttcaaggacgaggtgcgcgcgctgggcacggcgctcgggctgcccgaccacatcgtgcaccgccagcccttcccggggccgggcctggccatccgtatcatcggcaccgtgacgcgagagaagctggagattttgaagaacgccgacgccatcgtccgcgaggagctggacgcctacaacgcccgcgttttcgaggagaccggcgagcgaaacagcgagcgcagcgtatggcagtacttcgccgtgctgcccgaaatcaagagcgtaggcgtcatgggcgacgagcggacgtacggctaccccatcgtcgtccgcgccgtggagtcaagcgacgccatgaccgccgactgggcaaagctgccctacgacgtgctggcccgcgtgtccggccgcatcgtggccgaggtgccgggggtcaaccgggtagcgtacgacatcaccagcaagccccccgcgacgattgagtgggagtaacacctctcgtctaacgttttcttcagcgaggcagacaactacccacaccctgaaaacataagcatcgattcaaacaacggagctgcatacagcaaagttctcgcgaagcatttttacatggtttaattcgcgaaccgaagaagaggggcggtcatgaacgacgcagtcaatcttgaaaaacttcttatttctaatccatatggctccaaaaacgaattcgaaagcgttgccacttttgaagaaagcgatccatacatcagatggctttccattgatttcgcccttgaaaacgaagccggttcgtcaagcgtcttcatttatggcgaggcggaaaaggctgacgatgccgcgcgtttgttcggcgcgctaatactgggagaacaggccttgcgagatggggaagatttaaaggacatctgcgacgcttgcaactgcgacctttacgaagcgattgaagaacttgattgcgagggtttgcttgaaagccctgacgtattagaatgcaacatcctgtatatccatagtcttgagctttccagtacattgatggatgcgagcaacctccaccggttcttcgaccggatcccttggtatgtgtttcaatacaccaatgtgatgccgcaaatcgtctactatcagatcgcgagcgttgaaggatattacgaagaagccgcttccaaaacaagctacgatcgcagatccgtagacgaaacatcgccgcagctatttgccaacaatggatacacgtccagcgagtcgggcattttgctttacaaaatcgtcgacaacggaacactcttgccatgcgacaacgccgacaattcgagtttcatcgaagataatcgaagcgccgacaacggagcgagtctcgacgactcgctccttttaactaaagaaaatcaggaactccgttctttgcctgaaacatcagcaaaacagctagagcaagattcgaacgatgacctggacaaaaccttcgtcttcagcaagcgatccttacttgaaaatcatataggattgagcgtcggagctaacatggcgctcgtacctagaaccgccccgaaaaaactgactcaatatgttgaagcggcgatctttgcgcacgatcttggcgtccgaatggattatgccctcgagaagtacgtctccgattcggaagtggatattccacccatctacgccttgtttcaaaagatgtacttcaccggcaagaatcatattgacgcaactatcgagcgaatgaagccaataggcgctccaagcgccggagagaccttcgcggatgtcgcattggtgcgagctgctaacacctattacgttgccgcattgctttatcgagagggtcacacgatcgaggcacacgcaatgagcaggttgatgcttgagcagattgcatgggcattcgccgcttgcgaggtggatgagtgcggcttagcggaggcaatcgttcccacgaaggcaattggcaagttaaaaaagaaaatcaaatctgttggaaaaatgtacggggttctctcgaagtatgttcacatccccattcaaggccattatgaattcatcgacctaagccatggaagaaacgaggtattgacgcaattcggcgtgcattcctatgcgcgaggggcgatcatctcgcaacttgctgacttctggtcggctgtttacgagtacacacaatcgcgccattttgagaaactggagaactggatagagaccccttcgggattggaaatgaatccagaaagacccttcttatcagtgattcaaccgatatgtgaagaactgatgagggaatatgaggagaattacccttcgtatgatgaatacataaagtctcattggaaagtagacgacatatcggacaacgaaccgaatgatgcggctgatgagcccttcggcggaaacaaataaacaattacgagtgtggggcactgaacgacacgatcttgcccattaccgtatcgctgaagttaaagtagatactctgacttcgtccagtggcacattttctccgcctgcctcgatcccaccttcccgcccgcaagctcgcaaaagcgcactgcatggtattactgcatgtcaaatccaaacttacccctgtcgtcgatgtcgagacgggagccgatcctcgaacgaatgggaattgactcgaatgggccaccttccgatttgcgaaagagaacgacaaagtagttgcttatccttcaatgcaagaacaggagtagctctgacactggcgtcatgcttttgatgtgacgagcagcgaggaagaacatgagagccgtgaggctgggtgatttaggattgatgccctgaccgaaatgctggtgaaagcgtaaggagcaatatcgtgagtgctcataaatatgacgatttgtacaattatctagctgctttcaaaaacgactctccacaagagatagctctatacctaggagagctaggacagaaaagattcgattcttttgtcgaaggcgttgcacccctaatatttgtggagggatttgaaaatgaatcggttttcaatttcgcagttgactcaactcttgaaggtggcagctttccctgtactgcccatgattgccgcgagaagaatctatatgatctagcaaagttttctgctttgtatgctgataaagttctgatccattgcccgattgaatcagcttttgagaatgcgcacgatgatttcgtttcagttgatgagcttgcttttggaatatatctaactttgcgacttgaaaacattgtaaaagcaggcattgtgggatttgtaagcaactacgtccccctctgcaatcactgtcttgctcggcaaatagaattggaatccaaagccgaaaatttaatctctgatttctggaataacttgatagatcagttctgcgcttcaactgtctgtacgttaaaaatcgctcgagacggagccttgtatgtggccattaatggaatggatgcatacggttctcatgaagaggttgatatcgactttatcaaaattcctcctgtgtacaaatctctgtttaagaaacatggcgaaacgatactcgataaagatatgctgacaaggggaggtgtacttgccttcctcatacctttattgagcgattcttttactgcgctcactaattcatactttacaggaggatcgtacttaacaacacgccctgctcaaatcaggtttttagaatcagcagcactgactattgattctcagagaaagcagatggattcattccgccagttgtcatgctcgtttcccattgttcagaacgcttctataaaaagcatcttggattttcgcgcaagaaacgaagaatcctttgctgtgttccgagatactataactaaaggtctaaaaggaaagccgatagatagctcaacaatctcggaactaaaaaccgaactgattgatcccgagataaataagataaatctggccatgaagaacaacagggcacgcttgattacatcgacaggcatcgaagcggctattggtattgcaagcttcgctttagggcagtacggtatagtatcaccagctgaggcaatgactattttcggcgcagcaggtgctggttcggttgcgacgcaagtagttaatcatctacaagcagccaacgtaaagaataattccatgtatttcctttgggaacttgatagaaaaagccattaggtaccgaatgagtatcatctgaatggacaataggacaaatgaatgaatgcatatgatctggttcaactaagttgctttcatccgacttcgtcaacaaataaaacgatcgagtgggagtgattccacacaaaaaacgtcttatttctagctagtgctccggagttcgctctggagcattttcgttatacacaacacagctggaaaagctacaagcctttgaaaaccgaatacctcgatgcaagaatcgcataatgaaggacctgattcgcaaaacgggagcgccactatcacctcgtgcgaccaacgaagccgacctacgaattgatacccatttcttaactacccaggccagctgatacccaaaagacatgcttataatgtcttttgggtattctggaatgcgcccacaccaaacggaacgcgcgttgattaatccaagaaacaagttttagaaaagctcgcgaatctcgacgtcgagctcccaggcgatccgggacatgatgtcgatagacagattgcagcgcccgacctcgcctgcgctcgacggctcccagaggtcgtcgcgcagaacttcaagtattcgctcttcgtccaacccatcgcatccatgatcccgttcagccggttgccaagaaggaggtcgaggccaacgaggcgatattggcttgagaacatcgaatacgtgagagactatgccgtcaccgatgtcgttttcgacaaagcgtccgtgtgcgaacaatttgctcctgttcccctcaagtgcaatgtcgccaatcctcatgacgttatatgtgtgcagataatcatcatcgcgcgttgtcgccgagggattgaatcgcatgttagcgacggagattgctttgtccaagccgtaacgtccgtcgttcttttcgtcgcgacgggcatacatctcccctaatttacgctgtccccaagcaccacagcaacgttgtcgtacttggaaacctaaatggctgacgcagtctagccgaggtcgaaaccgccggaaagaacgaactcgcgcagaagcttatcaagcatgatagagaccttaaagggtggtatggtcttaccctcgcgttgctcaaagaatgccttggcccgccttgggtctgctgttctcttgagtgagtcgaagcgtccgaactcgttgatgttgccttccgtcacatgtccagccatgagtcggcgcagctttccttcatcgatgccaagcgcctcaacgagggccgtaacctgtccggctttgccgcgcaccgcaaactcgttgatgtagtccatgaacgttttgccgggttcgatggcgaggtcgaagccctgcgcggcttgtatcactatctctgcgaggcgctgctgctcttggtcgagggtcgcgaacgagccatgcaaatcgtctagcatcgcgtcgagttcggactgctcgccaccggccgtcagacgcttgagccacttctcgaagttggcgttcatgtaggcagtgtcgatgtgaccagtgtctatttcggtcaggtagccgtggatatcgtagggcacgtcctcgccgcccgcctcgccgccagggccgaatagctccttgtagcgcagcgctagcacgaggtatgcgctctcgtcgaagcagagtgccacggtggtcttgccatcctcgtgctcgaactcgtatgtgagctcatcccagttgaacccctgaatttttgccgcctccagcgtgtcggtaagctccttgaagagcttggcgaacttcgcgcacgcctcatccgagtcgggcaggcggtcgaagctttctatgcccgcgatcttgaagacaccgacgatttgtccgtacacgtcgttcgcccaacgcagattgccctcgagtttgctcgcgaagaggcccaagggccggtcgcctgagtacaggccgaacgcggcgtgcatgttctgctccattgtatgcgggtagcggtaccagcgtacggtgccgaagggcttctcggggccgaaaaggcggttcgtgcggctgaacgcctggatcaggtgctcgtattccagcaccttgtcgagatagagcgtgttcacccacttggagtcaaagccggtgagcatctggtcaaccacgatgagcagatcaagctgctcatcgcgctttttctcaatgcccgcgtaaggcttcttgtgagcgagacgagccgccacgtcgcgcttgaaagcagcatggctcggtatggtgcagtgcttgccgaaggtcgcgttgtagccctccagcacctctaccagtccgtcctccttgtagacagcaccaccgttgttgtcgatgttcggatcgaagagcgccgttgtcttgagtcccgggtgctcgtcccggaagatgcgatagtagctgatcgcctcggcaatgctgctcgtggcgagaatcgcatggaaggtgcccgccagcgagcgccgctgccagccgccgcagatgtcgtccaccacggcccgcaggtgttccgaattacccgtgccgtccgcgccgcaatactggctgcggggcacataatactcgatgccgtggataggttttccgtccccatctgtggcgtcggatgccatgggcagcgccatgaagcgcagatagacccttttcttggcggggtcggtcagagcctcggcaacgcttcccgctttggcgtggtgtagcgccacctcttctcgcaggtcgtcgtctcggaaggtgagcaccttgtacgggtcgaatcccagcacgttcttatcgcggatgccgtcggcgatggagtagcggtgcagctcgtcaccgaacacgtccacggtcgtgttctgcttcttttggttctcgtcatggatgggcgttcccgtgaagccgaagtacatcgcgcaggggaaggtcttgcggatggtctgcatcatgtcgccgaaggtggacctgtggcactcgtccacgatgaacacgatgcgcttagaacgcatacgctccaagtcggcaatacggctggattcttcgccgatgttgctcatcttctgtatggaggttacgatcagagtgtcgtcggggttgtcgctcttgagcttcgcgacgagcacgtctgtgttctcggtctcggccactgcctgccttctctgctcctcggaaaggtcggcccctgcgaagttgcggtattcgtcgagcgactgcgtgcccagctctatgcggtctacgagaaatatgaccttgtcagcatccttggatgaggcgatgagctgggcgctcttgaagcttgtcatcgtcttcccggagcccgtagtgtgccatatgtgtccacctcggctactcgccttgtcccacttggattgccgaacccgccctgatatgcgcgacgcggcaaagtactggtagctgcgcatgaccttgagcgtgttgtccttgctgtcggctacagtgtagaagccaatgagctggtgtgccatggggatggacagcaggtcgcgcgcgacgtctttccagtagttcaccggctcgttgtcgaagtccgcccagtggaagttatatgcctcgaagtcgccgtccgcactggggttggcgaagtagactgtctcgtcggggttcatggccacgaagacctgcaccaggctgaacatccgcgtgaacacgccctcgtgcgcgtactttcgtatctggtctcgagcctggctcacgggcacaccgctgcgcttgagctcgatgtggatgagtggcatgccgttaatgagcaacatcacgtcaccgcgacgcgtgggaagcatcttgctcttggtggagaagtagggctggcgagcaatctggtaacgggagcgcccacccgctatctcggcgcggtcgtagatgtgaaggctcacctgcttgccgaagtgaagcaggtcggcctcgttgtcgcgcgttatggacacggtcttgccgttaatgaagccgttgaggcgcatgggtgtgcgcagctcgactatctgctcgataatctgagacatctcgccggcggtaagcggttgcccgttcaaccggtcgatgccacggttgttctcgaagaggatctgcgcccagttgtcgagcagatcctgctcagtgggatggttgagcgtgccgttcttccagccgtagtcgttcttcaataccccgacgagagcatcctcaaaggccagctcgttagtaaatacatctgacatcatatattcctgcctactatacgaacatcttttccaagcacgcagcttttaggttccttagcaaagtgagcttacgctggtgaagggtgatgagatcgtcgaggtcgcggaagaaggagcaaatttggctttgctcagtctgcgttgggattgcaatttgtcgctttttccaatcgtcaacgtcaaaaactagcttttcgatatcaaccccaaatgagctcaaaaaatagcatgtgcacattgtttttgtcatggaaagaagagcccaaaattcgcttgatattttcgcatttccaacaagaacaagatactcgtttgaaactatcgctccagataaggatggaggtactagaccattaccgccatggacaacctgtctttttgatattaaaaaatccccagtctgcaattcctgataattcttaactaggatatcgcggcctttaaccacggaacgctgtactacccctgcgttcttgcgttttactgtgactagctgatattccttatcatcctctatttcgaccgtccgaaaaacgatatcggccacctcccccagcttacgctgtttccaagggtcagtgaaaccggcgaatctgatttcgggaacggatgcaccgtctcgcggaaacatcttttcgagcaatgccttcttgagtacgacaaacttatcgtacttacgctggtgaagggtgatgaggtcgtcgaagctgagcgccaacgatgaaattgcctgctgctcccttgtcgttggatatgggaaatcgacatcggcgatatcatcattgtgaatgtgaacgaccgatttgccttgcgctcttttcgctagctctacatgcgcctttccgtacgtgataaccagtgcaacgtagtcaggatccaattccgctccaggggttaaaacgttcagatcgccacctaatacgatatctgatctgcgaacggacgaggcgaccgctatatcttctgcggtttcgccagaggcaggcacaatcacctcgttgccgcaagagaacaaagaaccttcgcgctcaacagcaaacgtatcgacgtcgtctatgcgcgtttggtatcgcgtatacaagcgtccgtagagaatcagcgggactcccgaatcgcaaatatcggccttgctgtacccacggccttttgcgaaagaacagagctcccccagcttacgctgttcccaagggtcagtgaaaccggcgaatctaatggcaggcacgtggttcatcgagcatcaccgcccagcagcgtggcgagctctcggataccagccatgtcgaactcgttaccggtgagctgttccagcatgctaataagttcatgttcagactcgcggatccgctcgtctatatcagcataggtcgtggcatatttgtcagctagagcgcggatgtcgtcgataagcgatccgatgacagtatccggcatggtttcgatacgtcggacaagcggatcaatccattttgccgaaagcagcaaacgcgcttggtcgtcgctaagctcttcgatggctttcttcgacttgccgtcgagcaccgactttgcctccttgagccggcgtttcaagtcgcgctcctcatcgtagaaccgcgccgctgcatcaagtcggcttggcagcgagtccgcagagcgcgcctcgtcacccatctcggcacgcagggttttggccatccccttgagcttggatgcgacgaaggcatcgcccgactcgttgacagcgtctcctgcgtccgacttctcctcgtcggtcagaccttccaggatctccgcgatctcagatgcgacaacgggaagcctgaactccatcgcggccacttccgccgcatcctcggcgagcagttcccgctgcaccagctcgaagggcaggacatgtccgacccatccgtcctgcacctcgacgtccttgccgcgctgcttcttcaagaccatacgtgggtctacgcgccgcaccgcgtcgaagccctcggtctgcagcacttcgagatcaatggcaatctgctgccactcgtcatcgagcgcctggtaggcgtcgtaacggtcgattaaatcgataccctcgaggcgactgaacagctccgaggacaattgtgcctcctcggagctgcggacaacaagcgacggttcgtctaccagctcctcgtaaagccacggctcgaagtccgcaaaacgtccggcgaactcttcgcgccaggcacctacggccttgctcttgcggacggtcgattcaatatcctcgctcgccagacgcatacttgcggggttgacctgttcgaacagctcctcgcgtagacctggtaacgcgcgccagtagtgcttgagcgcatccacttcggatgtgggtataccaccgtacatggtggcatagatgtcccagccgcacgttcgctcggaggagtcaacgtagcgcggaatgttcaggttgtagtcgttggcccgcacatcgtcttttctcaccactcggcagtagcggtcctggtcgcccctggcttcgtaggcgtccacaatgcgccggatgtcggaggcgcggagcttgttgttctttccctccttcacgtagcccttcgacgcatcgatgatcaggatgtcgtcgcgttcgcgcgtcttgcgcagcaccatgacgatggtggggatgcccgtgccgaagaagatgttggccggaagcccaatgatggcgtctatcttgtcgctctccacgagattgcgccgaatctgaccctcctcgccgccgcggaagagcacgccgtggggcagcacgatgcacatgatgccgtccggttgcagatggtagaggtcgtgcaggaggaatgcgtaatccgccttggactttggcgcgataccgtagtcgtcgaaacgcgggtcgggtgcatccggcgcgtcccagcgctgcgagtagggcgggttggatacgacggcatccacgaacagcggctcgtaggtctcggggtgtccctcttcgaaccacggccagtcgtcagccagagtgtcgccgtttcgcgtcacaatgttggccgggtctatgccgcgcatcacaaggttcatgcgcgtgaggttgtaggtgttttctttcagctcctgcgcgtagtacttgatgcgcccttcgctgcccatttgtcgtgccacggcctggccgatatttatgagcaggctgcccgaaccgcttgtggggtcgtatatctggatctcgtgacggtcgcgcagatggtgggccacgatctcgctcatgagcaacgatacctcgtggggcgtgtagaactcgcccgccttcttgccagcgttggcggcgaagttggaaatcaggtactcgtagatgtaaccgagaacgtcgtagccctgccgcccatccatcggaatgtccttgatgaggtgcagaaggctgctgatggccttggtgcgggcacccgaggtgtcacccagcttggagaggcccgtctccagcgtctcgaagatgcggtcgaatacgtgccggtggtgcgggtcaacaaggcgcgagaacgcgctgagtgcatctgtcacatcggacacgtcgaagtcggaacctttggcgagccatgtggagtaaagatgctcataggctatgaagtagccgaggttcggacggacgaagcccacgatgtcggggtctgcttcggtcacggacaccatgtctgcgtcctcgaagccctgaccgtgcagccacgactcttccttttccgaaagaaacttgtagaagatgaacccgagtatgtagtccttgtactcgcttgcctcgatcttcgatcgcatctcgttagccgaggcccagatttttgctgctagctgctgcttgttcatccactactcctgttctcgccggaatccagcgtaagtcgccgatgggtatgaatccaggtaactgcgtacaccgtggtcaatctttctccgtcagtcgctcaatgaggcattgttttacgagcgaggtgaaggtgaggccattgaggttggcatactccttcgccgactcgcgcatagtgcgcggaagcctcagtgttacagtgacaagctccgagtcaacgagataggattgcagttccgaggtcggagcgcccgattcgacaagctctgagtacttcatatgaacccctaccaagtaacgccattgtaaatacacgtcgaaatacattctaacagacaacaacattaagcatgcctcggatcgacccgcatcgcgcgcgtcagcagggcgcatccgagctttcgggcatccgatgcggccaccggctcgccgaggaacatccacgcatgcgcgccgttgcccgaccgcgagcgttcgatggcgacgggcacgccctcccgctcgcacacgctccgaaacgcgcccaccgcctgctgccagtcgtccttgtcgaagtcggccgcgagcacgcgcatcttgtcgtcatcaacaagcggataacccgcgacgattcccacgccatcccgtcccgagcctcggaaatgcgccagcagcgcagcgtcgtcgagcggcaagaactcgcggttcgcacagtccgcgcacttgacgcggggctttccgcacacgctgcccttccactcgttggcgcatgcgggcgtgtagccgacacgccccgtcttcttgttgaagtagcttttcgcgtgcacgtcgctgcgcatggcgaacagcgagttgaacagcgcgagcttctcggcggatgagctcgccgaggtcacgacgccttcgtccgccaaccggctcgcctcgaaacgagcgcgccccgcctcccacgtttcgcaggtcgcgtagcgcctcgcgccgtcgagagcctcgcacaccacgacctcgccatcgaccgtcgccgaagccagcttctcgacgaagcgatactcgacgccggcgatcagcgtgcgtgcggcctgcggcgaaccatcgtccatgcgggctcccgtctcgaagaacagctcgcatcagaatactacgagggggactcgacccgcaattgcccctcgcaacctcggtgatacctagtcgaccttactcaaccaacgtccgagcagtgcgcctccctcgcaaagtgcgtctccgcgatttcgtcaagctgcatgcgtatgctttcgaacggcaatcccagatcgagcgtgcgcacgcttatgcggttgccgctcatccggtagaccccatcgggctgaatctcttcgtccgtcttggcgtagagcagcaggcccgatacagtatgcggcacttcggcaagctcggcctccttgttcttcacgtaggcgaagatctgatataggttgcctgaatggatgctgcgcttgtcgaaccgccgctgggtcgtgcatgagtagtacttcgcgtcgatgatgagcacagcgcccccgtgacaaagcatgacatcgctcttcatcgttggcaacaggtcgtcgaaatcatcgtcgagagcccaaccgatacaagaagcttgagcggcaagctccggatgctcctgccgatagtattccaggatgaacttttcatacagacggctcatgcgttgctcgtcaaagaagtccatgagcttggcacttccatctgcctgcgtctggagcagccctttggcaacaagccagcacacgcccatgagcatgcggtatgtctggttattccgatcgaaacgcatatgccaatctaccgtggcgaggtcaacgtcgcgcacatcggaaaagaagaccatcaggctcctgagttccttcttgcgagccttgcttatgtcggcgtgaagaagcaacctgcacgtcgccttgaggatgccgttcatgcgcgtgtccacgctgaattcgtcataggcgcatatcatctgtcggcgcatcacgctgcgcgtcttcaccgactcagacacctcgatcttgccccgcagggatgagatcgcctcggtacggtccatatactcgcgccccaacccgcgtttgatctgcgagcttatgcctcgcgaaaggatggccgcgcaaagctccgctgcgttgtcaaactgctcggttgcaacgtcgcggtaaccccgccctctcagcacctggaaagcatacgccagcatgtggtagatattctgaatgcggatcatttgatggccctgcgcagcgcatcggcccattcacgcactttggacggctcgtcgaaccagcactccctcaacagaggcaccagctcgaactccacgatcgcagagagcgccgcatcagtcacatcttcgaccctgagtccgcagaaatagctatggccgatgcaaaagccctcgcccagagaatcatcgtcagctattgccgcgttcaaccgcacaacacatgagacgagctcgttaaacttggggcttgaaagtccgtcgcgatattcggcgaagccgtcagaaccgaacccgggcctcaggtcgacgaacgcgaaacgacggcgcagcgcgtaatcaagcatcgcgagcgatcggtccgctgtgttcatcatgccgatgaggtaaacattgctcggtacatagaagagttcgcgcgagtacagcagttgcaatttgttcttaggtccgcgtttatcattctcgatgagcataaacaactcgccgaagatttttgagaggttgccacgatttatctcgtcgatgacgaaaaagtagtcattatcttcatcttcagctgcctttttgcaaaagctgtagaaagcgcccttggtcagttcaaaccctgcagcagaaggacggaagccttcgatgaagtcctcgtagctgtagctttggtgaaactgcactatcatcacgcgatcgacgtccttcgcgcccatcatcgagtacgcaagcctcttggccacgaacgtcttgccaacgcctggagcgccttgcaagatgacgttcttcttggagctcagcacgttcgtaagagcctcataagccgtctcgtccatgtacacttcagccaagaaatcctctgcaccgtacaaagggtattcgagcgcaacaactccctcctcccccacggcggcgtcttcgaaaaagggatctattttggccagaaagtcaggatagtcggtcatatcggtaagggtcttcatggcaaacatctcgccggtccgccagctgcccttatgactccacttaactttgcgaatattcggatagcggctttcgccctcgtcgtattcgtaatcaccgacaactacgccacgtcccaaaatttcggtgcgcccccgcttcgcgaagaccacgtcaccaggctttatatcgtggacaaactgccagactgcgtgggcggagttcttttgcgtcgtcgcgccgccacaaacttcctgcagtttgagctgcatgtcttccttggtcgcatagccactcaagtcgccgagatcgcaccagcccatccccattatgccgcgacggtaaaactcttcccacatgcttgcaccctcgccaggcgcataaagccaataatgcaccgtctccacgccggcatcgcccagcgcgctttcctcggcctccttatcggcggcttttgcagcagccttcctctctttattgacacgctcggattcgatgaacgcggcattggagagagccgggaaatcctgataggggcagtctttcgagccaagttgggagcgaacgacatcgcagatagcgaggtactctgctccactcggaataggcgagcccttttcttttggaaaagcggaggcaacaacgggtcccgctgttttcatgtcacccagataccagcgattacgagagtcgaggctgacgaaggcgtacggtcgaacccaatacaggcccatggtaagcttccaccccagaccgaactgcccgatagtcgcgtcgtacgcctcgacgaattcagcgcgattgagctcactgtcttccgcagcgagcttaatctcggcttcgaaggttcgccatagattgtcgatgtcgtgctccccacgccgtccatcccccttaaaggcgtagaacgtcgcgttgagattattgagcgtaggaacaccttgaaaatctttaggctggtctgcttcgattccgaaagcttccgcgaaagctgagacgatctttcttctattggtatccgagatgcctttgttgaagagtccgaagaccgtataagggtcgatgtcggcaggagttgatgagctatcgagtttcgggagcttcatgtcgactccctcgtagagagacagaagcttgttcatcaggctgcggcgatcatttttgaacgtcaatagcttgtccgccaaccttgaatagaagcctgtccatgtacaatgctccttcaccatcggtttccccttctctaccatttacggttatcggcttgtacgaatggttgctcgcaagctttgcatggaatgacgggacgtcaagattcgccgcccattccccagacttaagaagacgtcctttcactcctcccgtccaataatctcatccatgataccgcttcccgccgagcagcaaaagcatcccctatttcccccaaattcgccctccgggaggtggactcgccgcgcccgtcacgcgacaatggccccgtcaaccaatcgcaccgccccaggaggcccaccgtgaaccagatagcaaccggcacgttcatcgcccgcaagcgcaaggagctcaacctcactcaggcgcagctagcggagcgcctcagcatctcgagcaagtccgtctcgaaatgggagcgcggcaagtgcatgcccgactacgccgtggtgaacgagctgtgcgaagccctcggcatcaccgtgagcgagctgctcgacggcgaggagaacgagcgcgagaacctgcgcatgtacgacaacgaccagatgatcgagatgctcgcacgcatccagcgcctcgagagccagcgcatcaccatcatcgccatcgcgctcatcgtgatgggcctcgttcttctggccctctcgcccttgttcggcggctcggatttgaccgacttcatcagcggcgtgctgttcggcatcggcatcggcacgaccctcatcggcgtcttcctggccacgcgcagcgtgttcgcatatttaggacaggagaagtaaccatcgacgcttcttcgctcaaagttttccgcctgtccccaaagcgcacctcgcgacaagaatttttgtgacatactgacgtccatcttcgcaagcgatcgacggggggccgtcatgcagctcgacctcggctggaaaagccccccccccccggcaagccttgccaaagggctcgcctaccagcgcgaaggctgcgtgtcgggcttgaaggccaacgacaaaggctggacagccgtcgtcgaaggcacgtacgattaccgcgcttttgtccccggcgcacccgccgacctgtgcgaagcgcgctacgactgcccgtacttcgcgggcggaagacccgtcgcgcaggagatggcggaggacttcaagaaacgctacccgcgtcggcgcgcgcttatggaggagcttgcaaagctcggttgaggccgcgcatcgcagggccgcctgtggcacaatggacgcgaaccgattccgctgcgccgcgcgaaaggagagccgccatatggacgagaacgcacccgacgccacagggccccgacccgaatgccaggccaccgacgccgcgtcggcgcagggcgaaggcgctccgaagaagacggcggccgagtacgccgcgaccttcaacaaggccgtcgacgtcgccgagcaggtgctgcgcttcgctccccttcccgccggggccaagcgcgtggcgacccgcgccatgcccacggtgaagaaggtggcgaaggttgcccccatggtggcgccggccgccgagccctacgtgcgcaaggccgccgccaaggccaaagaggtcgcgcccgaggtggcccaggctgcgaaggcgggcgcgaagaccgtcgctgcaggggcccagaccggcgcgcgggcggcggcgtcgggcgcgaagacggtcgccgggcacgtgcgcgagacggcccccaagctggggcacgcggtgtccgacggggccaaggccgccgcgacccgcgtccatgacgatgcccccaaactcggccgcaccgccgccgacaaggcgtcgcgcctgactggcaagttcaagcgcaagaaaaaggagggctgaagctgtgggaggcaacggcgacaacgcgcagatcgagctcctcacggagcgcctgcagggtcgcgacaacgcagacgcccacgcggcactcaaagagctcctcgcgctgagcgaggccaccgacgccgtctccgcgcacttcgacacgttcgcccgcctgctgtatgcgaagagcgccttcgcccgcacgcgcggcttcctgctgatcgtcgcgaacgcacgttgggacgccgaggggcgcacggccgacatcttcgacgacctcgcgcgcctgttcagcgacccgaagcccaccacggcgcgccagtgcgtccaagctgcgcccgcactcgcccaggcacagccgtcgctcgcaccgcgcatcgccgaagcgctcgagagcgtcgatcccggccgctatcccgacagcacggccccgctcgtcgccgccgacgtcgccgcggccctcgaggccgtgcgcgcactcggctcgaccgccacctgatgcgcgaaccttaagcctcttcatggtagaattcatccgaaccgaagccggcccggcgcgatgagcgccgcaagccggcgagacgcagagccaaccggacggagcaaccgcatcatgatcaaagaactcgtgaccgacgaagccatcctctcgcagccgtgcgagcccgccaccgccgaggacgccgccgtggcgcaggacctgctcgacaccctcgcctcgctcgacgaggcggcgtgcctggcggccaaccagataggcgtggcgaaggccgtcgtcgtctaccacgacgaggacgaacagccgcacgtcatgtacaacccggttctcaagcaggcgctcggcgcgtacaagacggtcgagggctgcctcaccttggaggccgagtccaaggtcacccgctacgagcgcgtcaaggtggtctacgacgagctggtggacggcgccctggtcagccgcaagcgcgacttcaccggctggaccgccgagctcatccagcacatgatcgaccactgcaagggcaagctggtctgaggatatgagcaacaggagatccctttaagccttgttctcctgaattatcagccaatgtctacgctcgccttctcgctcaatcaacgcaatttgatgaaatgaggggacgcgttatccgcgcaaaaatacgagagctccctcggaaaagatcgtctcatgaatgatagacaacgcataaagacaaccgttcaggagtcgatagactattggtcgggacatgtaaacgaatgcggactgagcgtagactggagcgaagctgaaactcactgttggaggtgtggctgcaagagaaacctggagcgatgtcatattgtgccccacgccctaggtggaaaagacgaaccatcgaacatagttcttctctgccaccgatgccatgcagaaggaccaaacgtcaacgacccggaaatcatgtgggactggctgaaagcttacggtgtttcatactatggcacgttttggaaaatcgtcggaatgaaggaataccgcttcatatacaggcacagtgtactgaaagaggcggaggccatattggaatctgcgggaatccccgtggattcccctttggcacaaaagcttttcaacgaccatctcgatagggcaacccaagaagcaagtattcactatgggcagccatatttcaacgcagccacgatggcgggcatattccgcgtggctctcaagaaaatggcgaagacccttggcgttgatttcccttcgctgccggaagtcagggatattgcgcacgaaccatggtggagcgagctgacgtagctcaagcttcgtcgtgcgcccgaaacacaacaggaggcttttgactatgatcaggcccatcatgacgaatcggatgttcctctcgctgccctcatcggccgccacggcggccgacgcgcagacggcgcaggacctgctcgacacgctcgcggcacacgcccacgaatgcgtcggcatggcggccaacatgatcggcacggccaagcgcatcatcgtcttcgacgacgggggcacacagcgcgtcatgttcaacccggaaatcgtcagccgctctggcgcgtacgaggccgaggagggctgcctgtcgcttcctggcagccgccgcgcgacgcgccaccgcaccatcaaggtgcgtttcgaggaccgagacttccaaccgcgcgagcaaacgttcaccggcttcaccgcgcagatcatccagcacgagatcgaccactgcaacggcattttgatctgaccgacgctcccataggcgacagagacggctccgctcactcgagcctccccctctccacgaatcgctgacagcctgcattcgtgcggccgaatccggtagaatgtttcggcgaacttttcaacctgaccgatgcgcgccgcaaggagaacccgtgccgaccgaacccttccagaaccctgccgacaacagcgccgaccccgttttcgaccaggagcaacagcacctcgccggcacctacgcgaagctccagcagatcgggcgcgccctcgtgcgcaagatggagcgcgcgcagcgcgaggcggcggccgacaagaaggcgatggccgaggagctcgcgcccaacttcgccacctacgccgacgcgatggagacctacgccgacttcgcggccatgaaccgcgtgatcgacgggtacaacctcgcgcaggacgccgacgccgccgagctcgccaaggtggagctgctcctgaagcagccctacttcgccaaggtcgccctgcagttcaagcccgggcaggagcccaaggagctctacatcggcacggccggcatctcggacgagaactaccaccgcctcgtggtggactggcgctcgcccgtggccgagacctactacaaccaggacaacggccgcacctcctacgtggccgacggccgcaccatcacggccgatctcaaactgcgccgccagttcgacatcgaggaagaccgcctgaacgcctacttcgacaccacggtcgccatccaggactcgctcctcctggcgtcgctctcgaagcagcgcaccgcgcagatgaaggccatcacggccaccatccagaaggagcagaacaccgtcgtgcgccacgaggacgtgccggtgctgctggtgagcggcatcgcgggcagcgggaagacgtcggtgctgctgcaacgcatcgcctacctcttctaccagcagcgcggcagcctggacccgagcgaggtcttcctcgtctcgccgaacccggtgttcagccactacatcgcgagcgtcctccccgacctgggcgagcgcaacccggaaagcctcacctgggacgagttcgcgcgccgcctgctgccgcccgaccgcggcagcggccgcgtggacgtgccgctcgccgcgctcgcgcgcatcgatagggccgtcgaatcgttcgagttcgacgcgaacgacttcaaggacgtccgcgtggaggacaagcgcctcatcgccgccgaccagatccgcaagctggccgacaagctcggccgcatccccgccggcccgcatcgcatcacgctcatgcgcgaggagctgcacgcgcgcctggagagccgcctcaagcagatggccggaaccgacgaggcgctcgacgagctggaggccctcgaggccgacgagcagctgcgcatcttcggcgagctcatcgcgccgaccgacgagcaggaggagcgcgcgctcgccctgcgctacctgaccgatcactatgccgacgccttcgccgccgtggagaacgacgactggctgcgcatcgaccgcatcggcatgcgccttctcgaaaccgacggcctcgcgccgctcgagtggctctacctgaagatggcgctcacgggcctcggcaacccggacgcgaagtacgtgatggtggacgaggtgcaggactacaccgccgcccagctggccgtgctcgcgcgctacttccgccgcgcgaacttcctgctcttgggcgacccgaaccaggccatcgcacccgacacggcctcgttcgacgaggtgcgcgaggtgttccaggccgcgcgcggcgcggtggaggaatgccgcctcatgacgagctaccgctcgacgcccgagatcaccgccctgttcgcgagcctgctgccgcccgaggagcagctccaggtctcctccatccagcgcgccgacgagccgccggccctccgcgccttcgacgacgccgccgcctacgcggacgccctgcgcgccgccgtggccggggcgcgcgcaggcgaggggctcgacgccgtcatcgtgccgtggaagcacgaggccaaacggctccagcagctgctcggcgaggacgcgccgccgcttttggacgagcacgacgagctccccgcgagcggcgtcgtgctcatcacgctcaagctggcgaagggcctcgagttcgaccacgtcgtcgtgccggacgcctcggcgcgcgtcttccccggcgacgacctctcgcgccgccgcctctacaccaccatctcgcgcgccacccgccgcgtcgacgtgctggcgaagggcccgctcacgccgctgctcgacggcttcggaaaggaaacctcatgaggacgttcgtcgcgctcgatttgccgccggacttcgccgacgacgtcgccgcacttgcccgccagctgggagccgctgtggagggccgcttcctgccgcgctcgacctaccacctcacgctcgccttcctcggcgaggtcgacgaggcgcaggcggcccgcgcggctgacgccctcgacgccgcgtgcgcgaacacggcccccgtcgcgctggcgagcgacggcctgggcaagttcgggcgcgcgagcgacgcgacgctctggctcggcatcgcccccacccgcgagctggacgatcttgccgagcgcctgcgcgacgagctggcctcccgcagcgtgcccttcgacgcgaagcccttcaagccgcacatcaccctcgcccgccgcgcccgcatccccaaggcgagcctgccgccgctcgccttcccccgcgacgaccgggccgccgccgtcaccctctgcaagagcaccctcgaacgcaccggcgccgtctacaagccccttcacacgacgcacctcggcggctagcgggcagcccacgccgcggccgacccgccgcgaccgcccggccgctctcggggcttctcgtgcagaaaccgcgaatcgcctgcccgcctcgccccagacgcgcgccgggagccttatactggtacctttgttggcactgcaggctacgggcaagacgaaaggcaaaccaatgggcggattcttcggggctgcatcgcatcacgatgtggtgctggacgtatttttcggggtggactaccactcgcatctggggacacggcgcgcaggcatgatcttccacgacgaggaagtgggcttccagcgcgagatccactcgatagagaacacgcccttccgcacccgcttcgaggacgatcttcccggattcaagggcatgagcggtatcggctgcatcagcgacaccgacccgcagccgctgctcgtgcgctcgcacctgggcacgttcggcatcaccaccgtaggcgccatcaacaatgccgagcagctggtggagcgctacttctccagcggcagccgacagttcatggccatgagctcgggagccgtgaacaccacggagctggtggccgcgcttataaaccagaaggacaatttcgtggagggcatcaagcacgcccagaaagagatcgagggctcgctcaccctgctcatcatgacgagcgacgggacgatcatcgccgcacgcgacagcatggggcgcctgccggtgctcatcggaaaggacggcgagggcttctgcatctcgttcgaatcgttcgcctaccacaagctgggctatcacgacgagtacgagctggggccgggcgagatcgtgcgcgtggacgcggacggctacgagaccatctcccccgctggcacgcagatgaagatctgcgccttcctgtgggtctactacggctaccccaactccaactacgagggcgtgaacgtagaggtcatgcgctaccgcaacggcgcgatcatggcgcgcgacgaggcggcggcgggcggcgtgcccgacgtggactacgtggccggcgtgcccgactcgggcgtgccgcatgccatcggctactccaccgagagcaaggcccccttcggccgcccgttcatcaagtacaccccaacctggccgcgctcgttcatgcccgcgaaccaggacgtgcgcaaccgcgtggcgaagatgaagctcatccccgtgcccgagctcatcaacggcaagcggctcctgttcgtggacgactccatcgtgcgcggcacgcagctgcagggcacagtgaactacctgcacgaatgcggcgcaaccgaggtgcacatgcgctcggcctgcccgcccatcatgttcggctgcaagtacctgagcttctcgcgcagccgctccgagatggagctcatcgcgcgccgcgtggtgcaggagcttgaaggcgacgaagggcagaagcacctcgacgagtatgccgacagctccaccgagcgcggccagtgcatgctgaagtccatctgcgagaagatgggcttcgactcgctgggctaccagtcgctcgacggcatgctggaggccatcggcatcgaccgcgagaaggtatgcacgtactgctggtcgggcaaggaataggttttcggccacggcggcgcgcagaaacctgcgcgccgcttttttatgcgcggaaacgagaggatttacatcaaccgtcccggtagtaggacaagcaagcaggcggcggcgcgtatgatggggccaccatccaacgcacgaccccaggaggcaccatggtcgccaacgccgcccttgccacgaatttcccccttgccgaagcgccctcgcacggcgccaccgtccgcggagcgcatgcgcgcaccgggcaggatgcccccgccatccgcgtgatcgcctgccccggcggcgcaggccgtctgccgcagcatgcgcgcgccttgccggcggcggcgcttcccgctgcaagccgcgaggcggcggcccggccgaaagacacctgccgcccggacttcccgtcccccgcccacgcagcgcgcacggccctttgcctgcaaggcaccgcgttcgggctgaccgcccgcgagcgcacgttcgccaccggggccggcatcctgttcgcggccgcggcgttggcaacgatcctgctctgagacgagaacgggcggaccgcttgcgcagcccgcccgtccaaggttgttctcgcggccccatggccgcgcagctcgtttgccagcctctcgccgttctgctgcgcgaaacctacagcatgctcgcgcgcagctcctcggcgctcaagggcgacagatacgcgggcgggacgtcgaacagcgtcttgcagcccgtctgcccctcgacggacaggcggtgcaccgcacgggcacaggccgccagcacgctgccggtgaactcggggttcgaatccagcttcagcgagtactccaccacgtggccgtgctcgccgtcctggccggtcacgcccgagcggatcacggaaccgccgtgcgggatgccggcgtggtcgcggtcgagctcctcctgcgacacgaacgtcaccgtggtgtcgtagtcggcgaagtagttcggcatctccacgatggcgcgctcgatggcggccgtgtcggcgccctcctccgccacgacgaagcactcgcgcgtatgcttctggcgggtggtgagctcgggattctcgccggcgcgcacggcctcgagcgccgcgggcacgggaacggtgtactggcgtgcgtcggccacgccctcgatgcggcggatggcgtcgctgtggccctgggacacgccgcggccccagaacgtgtagtcgtgcccctcgggcaggatgctcgtggcgtacaggcgcgcgagcgagaacatgcccggatcccagccgccggagatcaaggctaccttgccgcccgccttcgcctccacgtccacgtcggcgaagtgggcggggatgttcgcgtgcgtgtcgaacgagtccaccacgttgaacaggctcgcgcaagcgggcgtctgctcgggcaggtcgcgcgcgctgccaccgcacagcacgagcacgtccacgtcgcccgtgtgcgccgccaggtcatcggccgcgtacacgggcacgccggcggtcagcggctgcacgctcgccggatcgcgccgcgtgaacagcgccgtaagctccaggtcctcgttctgccggcaggccagctccacgccacgccccaggttgccgtatccgtaaatgccgatgcgcgtcttcgccatagttccgctccttgccaaagtgtccgtacgtgttgcaacgatcatccacgaactgcgcccatcccgtcaatgcgcgcaggtcaactccaagaaagccccatcgcatcgaaacacgttggaaaccttggcggccgagagggtcggccgccgcgcgagaaatgtgcggagctgtcccataggaaggacagccgctccgagccgcgcgcgtatgatggcgatacaggcgaaaaccgagacctaggaggcaccgtggacgaaccgtcacgccccgcaaagcaagatgcgcagggagaccttcgtgaaggacgcgcgatgagcatgccggtggaggccgcgacggcgttcgcgaacctgtaccagcgctggttcgacgatgcccgcggcctcgcggaggccaaccgtcggcaagcacggggcgcgatcggcgcatgcgtggccgacgtggtgacgctctggaatgagcgggagcggtcatggctgccgaacgcgccgaccatcctgcggctcgagtcgggcgacctcgcagcgttcgccatgagggagccgtgcatcgccctgtattccggctgcatcgccacggacgcccccgtgacgggcctacgttgggagagcttccgcccctgctcgtacgccatcgggcggacggtggccgacctcgtgctcgtcaccggccgaggcggcctgctcgaggacgtggaggtcgtgctcgacgatggaggacggctgttcctgggcaaccgcgacgcatggccgctcgcccacgcggtctagctgcggccgcgccgaggcgtcactccccgtacgaggcgacgatgcccgccaggtagtcgcgatactcggccgcgagcgaggcgggcttctcgatgtgcacccggtcgccgaactgcgcgagccagccgaacagcacggggcttttcatgaccgtggcgtacacgcgcgcccagccctcgcccgccggcagggactcgacgtccttgccgaaccggtcgatgatcgcccccatggcctcgccgctcaccaggagggtagccgccacggactcgcccgaatacatgccgaacgcgcggccctcgagttcctgggcgtcgaacgtggcgatgcgctcgttcttcacggcgggcgcgtccgtgatcttgatgcgatccatgcggtcgacgcggtaggtggcgaagtcgtcgtgcttctcgttgaacacgaccaggtagtagtaaccctcggcgtacacgagctgcacgggcgtctcgacatagcgctcgccgccgtgctggagcaccttctccttggccgcgtcgtatttgaagtagacgaacgagatctgccgtttctgcgcgatggcctcctggatgcggtcgacactgtggaacaccgactcgttctgcatcttgatgcggccctccacatgcaggcgcttgtcgagcagcgcgcactggcgggcggacgcgagcctcttcacggcctcgaccagcgcgtcgctcttgcgctgcgtgaggaagcgcgagctctgcacggcgtccaccagcagcaacagctcatggaaggcgaagtcgcgccgttccagcgcatactccaccggcgcgcgctggtaggtgcgcacgtccaggccgaactcgcgcagcgcctcgatgtcgcggtagatgcctttgcgctcggccgtgatgccctgcgcctccagccgctcgaggatctgcgacatcgtgaggccctgctcagcgtcggtctcctcctcgagcatccgcataaggtacaggagcttgagcttctggcggttgacggccatagggttcctccttcgagcgatgcggtgcggcccgtcttcggaccggcaggttgccagtatagcctatctatccccttttcggtacatccttgcaaaaaacacgggagacgccctctccagggagcagggcgtccaccggagacggtgcggaatctgtgcgcgcacgtggccaaacgcacgcgctcgtgcgacaatagcgcgtgcacgaacgaaccccgacccagaaagctcgacatgccagaattcatttaccagatgcatcaggcccgcaaggcgcacggcgacaaggtcatcctcgacgacgtgacgctgtcgttctaccccggcgcgaagatcggcgtcgtggggccgaacggcatgggcaagtccaccctactcaagatcatggccggcatcgaggaggtcacgaacggcgaggcgcgcctcacgccgggctactccgtgggcatcctgctccaagaaccgcccctcgacgaggataagacggtcctcgagaacatcaagcaggccttcggcgacatcttcgcgaaggtggagcgcttcaacgccatcggcatggagatggccgagcccgacgccgacttcgacgcgctcatggaggaaatgggccagctccagaccgagatcgacgccgcgaacggctgggacctggacagccagctctcccaggccatggacgcgctgcagtgccccgaccccgatgaaaaggtcgaccacctctccggcggcgagcggcgccgcgtggcgctctgccgcctgcttctggaagcgcccgacctgctcttgctcgacgagcccacgaaccacctggacgcggaatcggtgctctggcttgagcagttcctgcggaactaccccggcgcggtgctggcggtcacgcacgaccgctacttcctcgaccacgtggccgagtggatctgcgaggtggaccgcggcagcctcttcccctacaagggcaactactccacctacctggagacgaaggccgcccgcatcgaggcgcagggccagagccaggagaagctagcgaagaagctgaagaaggagctggagtgggtgcgctcgagccccaaggcccgccaggccaagagcaaggcgcgcctggccgcctacgagcagatggccgccgaggcgcgcgcgaacaagaagctcgactacaacgagatccagatccccgtgccgccccgcctgggcgcgaaggtcatcgaggcgagccacctgcacaaggccttcggcgaccgcgtgctcatcgacgacctgtcgttcgacctgcccccgaacggcatcgtgggcgtcatcggcccgaacggcgtgggcaagtccaccctgttcaagatgatcatgggcctggaaccggtcgacggcggcacgctcgacatcggcgaatccgtggtgatcagctacgtcgaccagaaccgcgagggcatcgacccgaacacgaagctgtgggaagtcgtctccggcggcaacgacttcatgatcgtgggcgacacggagatccccagccgcgcctacgtggccagcttcggcttcaagggctccgaccagcagaagccggccggcgtgctctccggcggcgagcgcaaccgcctgaacttggcgctcacgctcaagaagggcggcaacctgcttttgctcgacgagcccacgaacgacctggacaccgagacgctggccagcctggaagaggcgctgctggcgttccctggctgcgccgtggtgacgtcccacgaccgctggttcctcgaccgcgtggccacgcacatcctggcctgggagggcaccgacgagaaccccggcaactggacgtggttcgagggcaacttcgaggcctaccaggagaaccgcctggagcgcctgggccccgaggcctccaagccccaccgcctccaccgcaagctcacccgcgactaggcgaaagcgagcaaggggcggtccaagcctaccccatctccccgcaacgcgagcggcggcccttcggccgccgcttttctatgccttctccacccgcacggcgcacaccttgtactcgggagccttcgacacggggtcgagggcggcgatggtgagccagttgctgtttccgtcctggaagtggaagggcatccacgtctggccggggttagtcttgtccgacacatgggccgtggtcttgagggagccgcggcgcgacgtcacgcgcacccggtcgccgtcggcgatgccgagagcggcggcgtcggcatcgttcagctcgatgaacgagctgccggacagcgcgcccaggccctcggtgcgcccggtcatcgcgcaggcgttgtactgggcgagcacgcggcccgtcatcatggccagcgggtattcctcgtcgggaagctctgccgacggccggtagtccggcgtggagaacgcgcccaccccctgcgcgaactcgtgccggtgcaggatgggcgtgccggggtgccccgcgtgcgggcacggccactgaaggccccgcccggccacctcgtcgccgtcgaggcgcacatggcccacgccgccgtacgacggcgtgaccgaggctatctcttccatgacctccgcggcggtcaaacgcggctgcccgtagcccatgcggttcatgacctccgtgaacacgtcggtgtccagccgcggccccgccggcccctccacggccttgcgcacgcgctgcacgcggcgctcggtgttcgtgaacgtgccctccttctccgcgtagctgcggccgggaagcacgacgtcggccagcttcgccgtctcggtgaggaacaggtcctgcaccacgaggaagtcgagcgccgcgagcgcccgcagcacgtgccccgtgtccgggtcggtgcgcaccgggtcctcgccgaacaggtacaggccgcgcacacgcccctccagcatggcggggaagcattcggtagccttgagtccgcgctctcgcggcaggctcgcgccccaggcgcgctcgaagcggcgcagcacctcggggtcggccaccttctggtagcccggcaggtcgtccgggccggcacccatgtcgcaggctccctgcacgttgttctgcccgcgcagcgggttcacgccgccgccgggcttgccgaggttgcccgtgatcatggcgatgttcgagagcgccatcacgccgtcggtgccggtggagtgctcggtcacgcccaggcagtacacgatggcggccgcgcccgcccctccgtacatcttcgcggcggacacgaggtcgcgctggtcgatgccgcagatctcggccacgcgcgcgggcgtgtagtcgcgcaccgtggcggccagcacctcgatgccctccgtgcgctcgcgcacgaactcggcatcgtagaggccctcggccaaaaggacgttcacaatgccgttcgcgaacgccacgttcgtgccgggccgcagcttcaaatggaggtccgcctgcgcggccagcccgatgtcgcgcgggtccaccacgatgaggcggcagccccgctccacggcggcgcgcagctgcatgccgatgaccggatgggcctcctcggggttcgaccccacgagcatgaccacgtccgccttccggcacacgtcgtcgatggagttcgtcatcgctcccgagccaagcatggtcgccagaccggcgacggtgggagcgtgtcaaacacgcgcgcagcagtccacgttgttcgtgtggaggctgatgcgtgccatcttctggaacaggtagatgtcctcgttggtggaccgcgagcaggcgaaggccgcaagcgcctccccgccgtactcgtcgcgcagctcggcgaagcggcgcgccaccaggtcgagcgcgtcgtcccagctggcaggctcgagctcgcccgtggcggcattgcgcacgagcggcgcggtcaagcggtcgggcgcatcgacgaagtcgaagctgccggagcggcccttcacgcacagcagccccttgttcgacggccccggcgcgccctccgcatcaacgatgcggccgtccttcaccacgaggtccagctggcagcccacgccgcagtgcgggcaggtggtgcgcacgcgctccgtctcccacgagcggtaggcaccgcggcgcttctccacgagcgcgcctgtagggcacgcctgcgcgcagttgccgcacgactcgcaggcgctcgcgcgccagtccggcccgaacggggcctcgacggtcgtgcgcgttccgcgcttgcccgtgcgcagcgcatggttgcgcgcggcggcgttgcaggcgcccacgcagcgctggcagcggatgcacaggttcgggtcgtagcgcaaaaacgggttgccctcaaccacgggctccggcgcgcgcggcgccgggtgcgccgggccttccacgccatactcgcggcagaggtcggccagctcgcaggcgccgtttttgtcacacgagaagcacggggcgcccgcgccctgcccgtggtcggcgatgatcagctcgagcgcgatgcggcggtaggccgcaaggcgcggcgagtcggtggtcacggccatgccgtcccatacggccgtcgagcacgacggcaccgggtggtcgaggccttccacgtccaccacgcacacgcggcacgagccgacggcgctcacatccttcaagtagcagagcgtcgggatgcggatgcccgcctcccgcgccgcctccagcacggtcgtgcccgcaggcacctcgcgcgcgatgccgtctatcgtgacgctaggcatactgttccctgccttcctcggtcgagccgcagccgaacacgtcgcaacgcaggcagcggccgcactcctgctcgacctcctcgcggctcataccgcactcgacgtcttggaaatcgcgcttgcgctcgcgcgccggccgttccaccagctccacgcgacccttgggcgtgcggtcgttgggcggggcctgcggggccgaggcctcgcaggccagcttgtgcgagcagcccaggtacgcatcgatgttgcgcgcggccaccttgcccgccgcgatggcgcggatgaccgtggccggccccgtttggcagtcgccgcccacgaacacgttgtcataccccgcggccgccaagccctcgtcggcgtcgaagcagccccggacggtctccatgccgaactcctcgaacggctccgtctcgatgccctgccccaccgctatgagcacgatgtccgccgcgatgcgctcctgcggcttgtcggccgccacgggcgcagggcggcctgcgcgcacggctccgatcatctggggctgcgtggcgagcgccgtgcagcgcccttcgccgtccacctcgatgcccacgggcgcctgcagcaccaccaactccacgccctcggccacggcgctctccacctcggccggaagcgccgtcatatcctccttgcggcggcggtacaccacggacacctcctcggcgccagcacgcaccgccgtgcgcgcgcagtccatggccacgttgccgccgcccaccacggccaccctcttgcccgtgaagtcggggtagtcgccatcgccgatggcgcccaacagctcaacggccgacatgacgcccgcggcgtccgcgttcggcaacgcaagcgtcttgcccgcctgcgcgcccacggccacgtacaccgcatagtagttctcggcgatctcggccatctcgcgcgcgcccaccggcgtgtcgcagagcgccgtgatggagccggcagagaggatgccgcgcaggtcctcgtccaggcgctcgcgcggaaggcggtaggcgggtatgccgtaacgcagcatgccgcccagctggctgcgcgcctcgaacaccgtcacgcggtgccccatgagcgcaaggaagtacgcgcaggtgagcccgctcgggccgccccccaccacggcgatgttccgcgcggtgtccacactgtgcggcggcggtgccacctggtcggcgggcgcctggtccacggcgaaccgcttgatgccgcggatgttcaccggagcgtcgatgagcgtgcggcggcaccgggcctcgcaagggtgctcgcacacgaacgcgcaggccgtggggaacgggttgtccttgcgcaccaggttcacggcgccggcatagtcgccggccgccacgaggccgatgtagccgggcacgtccacgtgcgccgggcagagcgtctcgcaggggaccgtctggcccacgcctgcggcgcaagagcgcgcacccacgtggcgcgcgaactcgtcggcgaagtcgtccaagccctcgagcagggcgttcgccgcctcgaagccgatggcgcagtccgacgtgccgcgcaccatctcggccagcgcgcggacctcggcaagcgtccccgcgtccgcctcgcagtccgccacgcgcccgacgagagccgccagccgcggcagcccgtcgcggcacggcacgcacttcccacacgtctgcgccgcagccgcctgcagaagcgcctgctgcaccacgaccgggcacgtgcccggcggcatggcctccacgcgccgcgcgtacttctctataaaggcggcgatgcgcccgtcgtccttcgccccgggcgccaccgataaccttgccaatgaccctcccccgctcgcttcgccatcacacctccgcatcatagcagagcagccgcgcgcccggccgccgccgcgtcgggaaccgcaaaccccacgggaatttcgacgggcggcggataggtgccgcccgggagcgggcgccctcgccgggacgagctcagagcctacgcccggcccgcagcctctgcgatagccgccttcagggtgcgtaaacactccgccgccgggcccgcgctcgcgcggccgtgctcggccgccaggcgcacgatggcgccgcccaccacgatgccgtccgccacggccgccagcgctgcggcgtcctcgggcgtggcggtaccggcgtccacgaggcacgggacgtccgggttcgcccgccgtacccgctccaccaggtccttggcctcggcgggatccccctgcgcgcccaccgcccccagcgacaaggcgcagcacacgagcccgtccgctccctgcgcgatcgcttgcacgcggtctcccgacgtaggcgccaccatcgaggcgaacgccacgcccgccgcacggcaggggccggcgaactcctccttctcctcgaaggggatgtcgggcaggacgagcgcgtccacccccgcctcggccatgcggcgcgcgaaccgctccacgccatggcagaacaccacgttggcgtacgtcacgaacgcgagcggcacgtccgtgcgctcccgcacgcgcttcaccagctggaatgccttatcgacggtcgcaccgccggcgagcgcccgcaggttcgcggcctgcacctcgggcccctcggccgtgggatcggagaacgggatgcccagctccaccagggccgctcctgccccggcgagggcgaccaccagttcctcggtagtttccaggtccgggtcgccgcaggtgacgaacggcacaagcgcctcgccgccctcgagggcgcgcgcgatgcgggcgacgcccgtggcggcggatacggccgacgatgcagcagaagcggtgcccgccgcggtcgaaagctcaaccgatgccgaagcagatgcgacagtcgaaggcgcagatgccgtttcgatgctactcatggaggttctcccctcgatagcgggcgatggcggcgcagtccttgtcgccgcgcccggatacgttcaccaccagtatctgatcccggcccatggtaggcgcgagcacgcgcgcgtgcgccaccgcgtgggccgactcgatggccgggatgataccctccgtgcggctcaggtactcgaacgcgtccacggcctcgtcatcggtcacggccacgtactcggcgcgcccggcgtcgtgcagggccgcgtgctcgggtcccacgcccgggtagtccagcccggcggagatagagtacacaggtgcgatctgcccctggtcgtcctggcagaagtagctcttcatgccgtggaagatgcccagcttgcccgtggtgacggtggcggctgtctcgaagccgtccacgccgcgcccggcggcctcgcagcccacaagccgcaccgacggctcgtcgatgaagtggtagaacgccccgatggcgttcgacccgccgcccacgcacgccagcactgcgtcgggcagccgaccctcggcctcggccagctgctgcttgatctcgcgcgagatgaccgcctggaagtcgcgcacgatcgtggggaacgggtgcgggcccatgacggagcccagcacgtagtgcgtgtcgtcgatgcgctgcgtccactcgcggaacgtggccgacacggcgtccttgagcgtggccgtgccctcgtccaccgcgtgcacgcgcgcgcccaagaggcgcatgcggtacacgttgagcgcctggcgctcggtgtcctcgcggcccatgaacacctcgcactccatgcccatgagcgccgccgccgtggcggtggccactccgtgctggccggcgcccgtctcggcgatgaggcgggtcttccccatccgctttgccagcagcgcctggcccagcacgttgttgatcttgtgcgagcccgtatggttcaggtcctcgcgcttcaggtataccttcgcgccgcccagatcctccgtcatgcggcgggcgaagcagaggcgcgacgggcgccccgcgtagttgttcagcaagtcggcgagctcgcggttgaacgcgggatcccgcttgcagtcctcgtaggcttcctccagctcgcccacggcgctcatcagcagctcggggatgtactggcccccgtggatgccgaaccttcccttggccatggcctctcctccttgccctctccgtctgcagcgcgccgaccagccccaagtctgccggcctcacgccgttccttcccaagtgcggggcgcgtcgccgcgtcgccctcttcgtcggaagggcatgaaaaaagcccgtcccgacaagcgtctgctttgccaaggacgagcttgtagcccgcggtgccaccttgtttcacggtcctgccgtgcgctttgcgagataccctcatatctccggcaactgacgtatgcccccacgtcgcaagatactgggcggccgggataccccgccaccgttcaccgcgccctccgtggcccatttggcaacctgcgtccgacccggttcccagcaccccgggctctctgtgcgtgcacagctgctttgacttccacctcaacggtttggttcaaactggctggcatcatacccccgcccgcagcgctttgtcaaacggggaaaccttggcgaaacccttgaggccttgacgccggcacgtcgttgcagtaggttcgagctcatacgctaccgccacactagggagaggcttcacatggccaaagccgccaacaaccggaaagtcgccatcgtcggatgcgggttcgtgggatcggccacggcgttcgcgctcatgcagagcgagctgttcaccgagatggtgctcatcgacgtcgaccgcgaccgagccgagggcgaggcgctcgacatcgcgcacggcatgcccttcgccggacccatgaacatctacgcgggcgactacgacgacgcggcggacgcggccatcatcatcgtcacggccggcgcgaaccagcagcccggcgagacgcgcctcgacctcgtgcacaagaacgtgcgcatcttcaagtccatcatccccgagatcgcccgacgcgactaccagggcatcctgctggtagtgtcgaacccggtggacatcctcacgcacgtggcgctgaagctctcgggcatgccggagaaccgcgtgatcggctcgggtaccgtgctggacaccgcgcgcttcaagtacatcctcggcgagcacctcggcgtggacccgcgcaacgtgcacgcgcgcatcatcggcgagcacggcgacagcgagatcgcggcctggagcacggcgaacgtctccggcatccccgtgaacgacttctgcgagctgcgcggccatttcgaccacgacgagtccatgcagcgcatcgccgaggacgtgaagaacagcgcctacgagatcatcgcgaagaagaaggccacctactacggcatcgccatgtcggtgaagcgcatctgcgaggccatcgtgcgcgacgagaagcccatcctgcccgtgtcgaacttccagcacggcgtacacggcctgcacgacgtggtgctgtcgatgcccgccgtggtgggcaaagacggcatcgagtaccaggtgccttgcccgctctccgacgacgagctggcaaggctgcatgcgtccgcgaatacgctgcaggggatcatcggcgggttggacttgaatctggactagaacagcgtcgcctttccgcacaagcgaggcatgctcgttggattgaggcgacgctaccgccgcacacgcccatagccaacatgaaagacgtcatcttgctacaaattcacctaattcggcaatatcgaacgagccagcctgaaggctaattaccgtgaacaggcgtttctcacaggcgaccttccgagatcggcttcagacagggcacaaaccgccgaattcggcgaatttgcagcaagggaggcgacggcctgggcgagcggaacgcattcgttcggatggcgcacgggagcagctgggaatatcacggctgtcgtcgcacggactccttcgactccgcgcccggggcgctccgcccagacgggccgttcatcgccacttcgtcctcagctcccaaaacgcaacggcgctggcggcggccacgttgagggagtccacgtcgtggtccatgggtatcttcacggtgtagtcgcaggcggctatcgtggaggcggccaggccgtcgccctcggtgccgagaaccagcgccaggcgctcgcagtcgcgcaggcgtgcatcgtgcaggtagatggcgtcgtcggacagcgcgagcgcggccgtcacgaagccgagcgagcgcagcagcggcacgccctcggccgcccagtcgcgcacgctgccgatgcgtgtccatggcacctggaacaccgtccccatcgacacgcgcgcggcgcggcggtacagcgggtcgtggcacgacggcgtgaccagcaccgcgtcgatgccgagcgtcgccgccgagcggaagacggccccgatgttcgtgtagttcaccacgtcctcgagcacggccacgcggcgcgcgcctgccaacagctcctccacgctcggcagcgcgggacgctcgaacgccgcgagcgccccgcgcgtcacctcgtagccggtgagcgcgtggaactgctcgcgcgtggccacgaacacgggcatatccgggtcggccgcgagcgcgcgctcgacgaccggcatggtctggtcgagccacttctcctccatgaacagcgagcacatgtgcacgccggtcgccagcgcgcgctcgatcaccttgcgcgattcgccgatgaacaggccgttcgcgctgtcggggcagtcgcgcagctgggagtcggtcatgcccgagtacaccgcgagccgcgggtcgtccaacccgtcgagatggatgatcggcacaggtcgccctctccctatgcggcggcctgcttgatggcggccagcaggtcgccgaactcctcgaaggccggcaggtcggggttgtcggccttgatggcgtcggtgctgcggaacaggaagccggccttgctcgcacggatcatccccaggtcgttgaagctgtcgccggcggcgatggtgtcgaagccgcatgactgcagcgcgcgcaccgtggtgagcttggactcggggcagcgcatgcggatgccggcgatccggccgtcggcggtcatgtccagctcgttgcagaagatggtcggccaccccagcttctccatgagcgggctcgcgaactgggtgaacgtgtcgctgatgatgatgacctgcatctgcgagcgcagctcgtccaagaactccctcgcgcccggcagcgggtcgatggcggcgatggtgcgctggatctcgggaaggcccaggccgtgctctgcgagcgtgtccaggcggaaggccatgagcttgtcgtagtcgggctcgtcgcgcgtcgtgcgcttgagctcggggatgccgctcgcctcagcgaacgcgatccatatctcgggcacgagcacgccctccaggtcaaggcaggtcacatacataggtacaacccctcttctcgaacgtttcccgaacgcctcccgcacgtccgccggatgcggcttacagcatacccgagccggcccggttccgccacgtcgcgcccggtcgtttcgtcgcccggatgcgcgcgccgggaagcggcggcagccaagccgccccttctcccaccacgtgcgacgtcaagcgcgcgaggctttgcccgcgccggcatcatgcgcggccgccggctacgcgcccggcacctcggccaccacttccacctccacgagcgcgcccttcggcaggcccgccacctgcaccgccgagcgcgcgggcaaatgagcgccgaacgagcgggcgtacacctcgttcaccgccgcgaagtcgcccagatcggcgaggaagcacgtggccttcgccacgtgttcgaaatcggtgccggcggccgcgagcagcgcgcccacgttgcgcatgacctgctcggcctgctcggcagccgtgtcgcccacgagctcgcccgtggccgggtcgagcgagatctgccccgaggcgaacagcagccctcccgccacgaccccctgggaatagggcccgatggccgcgggggcctccttcgtctcgacaacgtccatgagcgcttccttccgtattcggcgtttccgcccattctagcgcatcgcccgggccccgtttgccctatactcttcccaaccgatccatccgatgcgaaggaggccgcatggccgctaccgtcaagacccttatcgagcacagcggcgaattgtactggggcacgcgccaggcgatgccggggtaccatttcggggtgtcgctcaacgtgatggagaacgggctggtcgcgcgcgtggtgtacgtgatgagcgacctggacgacagcgaggagccccttgtgacgcccgagctgctggcctcggcgtgcttctccgtggacgacctcgcgccgaacggcatcgtgccgagcgaccttctggacgacgaggaggccgacgacgagggcgtcatcggctggtactgcgtggaggagtcgttcttcggcaaggacgacgtggaggcgctgcgcgccagcaacgaccggctggacggctacctggacatcgtcctcgcgatcatgaccatctcggcggacgagatagccgccggcatgccgtcgctcgaggaggtgtcgttcttcgacctgctcgacgagttggagggcatcgcggtgctcatcgacgagggcgcgctggcaaagccgctccccttcacgttccgcctgataggcgatgcgcttctgggatgggagtccgccgacgaggaagactggcgctaagggaggtgccgcccggcgcctgtgcggcaaggcggcgcccgtgcagcagggcggcagccgcgcggcacgcgccccgggcggcagggcagcggccgtgcggcacgcgccccatgtggaagggcgcgcccggaggggtcgtgccgaccgtcgaccggcccgtagcggaccgccgcgccgcccgcgttgaaggccgcagcgccgtcaacgggccccggcgcccgcaggcgcgcccacgcagatcggctggcacgccccctccctttatgttactatagtagtatcatttaacggcagggcagcagcgcggagccgccgcgggccccggatcgcaagggaagcgagccatgatcgacaaggccatcttcgcgcttccgggggtggggcgcatcctcgggctgctcgtggcgtccgcggcgctgcaggcgctcgcggtgctgggtcaggcgtggtcgctgtccacggccatcacgaacctgtggctgggcggcgcggtggtcgaccaggccctgctcgtggccgtgttcctcgtatgcttcatcgggcggcagggcgtgctctgcgcacagtccgccctgctcgacgcctacgcctacgagcaggcgaacgcgctgcgccgctcactgctcgagaagatattcaccacgaacgcccggctcgtgcaggaccacggcaccggcagcgtgaccgccgccgtgctcgagggcgccgaccaggtggaaacgtacttcaagctcatcctgcccaaggtcacgggcatcgccctcatccccgccatcctgctggcggcctcgttcgcgctcgactgggtgtcggggctcatcatgttcgtggcgttcccgttcatcatcctgtacatggtcatcatgggccacacggccaaggagaaggcgtcgcggcagcaccgcacgttcgagatcatgtcgaaccacttcatcgacacgctgcgcggcatcgacacgctcaagctgttcggcgtgtccaagcgctacgggaagagcatctacgaggtgtccgagcgcttccgcgaggccaccatgcgcacgctcaaggtggcgaacctctcgagcctggtgctggacacgttcgcgacgctctcggtggcggccgtggcgttcatgctgggattccgcctgatcgacggctcggtcacgctgttcccggcgctcgcgctgctcgtgatagcccccgagtatttccgccccatccgcgagttcgcggccgactaccacgcctcgctcgacggcaagaacgcgctcgcgtccatccaggcgctcgtggacgcgcccgacgagccgcctgcggagctgccgctgcccgcctggcacgccgatgcgcgcctcgggctcgagggcgtgggcttctcgtacctggggttcaaggcgctcgagggcgtgacgcttgcagccgaggggttccagaaggtgggcatcgtgggcgcaagcggctcgggcaagagcacgctcgtgagcctgctcggcggcttcgcctcgcccgacgagggcgagatcgacgtggacggcgtgcgggcgggaagcctgcgccaggcggcctggcagagccaggtggcctacatcccgcaggacccctacctcttccacgccacgctgcgcgagaacctcgtgttctactgccccgacgcgaccgacgacgaggtggcgcgcgctgtggaggtgatggggctcgaggggctcgtggacgagctgccccgcgggctggacacgcgcattggcgagggggcgcggccgctctcgggcgggcaggcgcagcgtatcgcgctcgcgcgggcgttcctcgaccgctcgcggcgcatcctgctgttcgacgagcccacggcgcacctggacatcgagacggagatggagctgaaggagcgcatgctgccgctcatggaggggcgcctggtgttcttcgccacgcatcggctgcattgggtggacgacatggacctcgtggtggtcatggagggcgggcgcgtggccgagcaaggtgcgccggaggagctgcgcgccggcggcggcgcgttcgcacgccttgccgcccagctggaagggggtgcgctatgagccgcaacgacggcgggcggcgggaagcggtccctgcgacgcaggccggcggacaccgggccaaccgccgaagcccccgcgaggccgaccgttgggtctcgcccttcttcaagcggtactggaaggcgctcgcgctggcgctgttcttaggcgtggccacgttcgggttcgcgagcgggctcatggtgacgtccggctacctcatcagcgcggcggcggccctgccgggcagcatcctcatgatccacctgcccacgctcttcgtgcgcatcttcggcatcggcaagcccatcctgcagtacctcgagcgtctcaccagccacgactgggtgctgcgcatgacgagcggcctgcgcctcaagctctacgaagcgctggagcacgacgccgtgttcttccgccacagccaccgcacgggcgatatcctggggcttctggccgaagacatcgggcacttgcagaacctgtacttgcgcgccgtgttccccaccgtggtggcctggctcgtgtacgcgctgggcgtggcggtgctcgggttcttcgacgcgtggttcgcgctggcgctcgcgctcgttttgggcgtggaggtgttcctggtgccgctcgtgtccgcactcgctaaccgggcgcgcatcgagcgccgcaagacgctgaagaacgagctgtacggcgagctcaccgacaacgtgctgggcgcctcggactggatcttcgcgcgacgcggcgacgagtacctgtcgcgttaccaggccgccgagcaggcccggcacgacatcgaggcgcggctgaaccgcttcgcgcggcggcgcgacctcgcgtccacggccgtgttcggcattgcggcggccctgctcctcgtgtgggccggcggctacttcggcggccaaccaggcgaggcggcgaactggatcgccgcgttcgtgctcgggttcttcccgctcatcgacgccttcgcgcccctgcccgcggccgcggccgagacgggcgtctaccgcgactccatccgccggctgaacgagctgccccagcccgcgccggaagagggccccgcgccaacggtggaggcgcccctcaccctggccgtggaggacgtggcgtttcgctaccccggctccgcgcgcgccgtgctcgacggcgtgagcttgaccatcccgcaaggccagaaggtcgccatcctggggcgcagcggctcgggcaagagcacgctcgcctccctcatccgcggcgatctggcgcctgcatccggcagcgtgacgctgaacggcgtgcccaccagcagcttcggcgacggcgtggcgcgctgcatcggcgtgatccagcagcagacgtacctcttcaacatgacgctgcgcgagaacctgcgcatcggcaaccccgccgccaccgacgacgagatccgggaggtgctggcgcacgtgggtctgtccaacctggtagagcgtctgcccgaggggctcgacaccatggtggacgaagccgggatgcgcttctcgggcggcgagcgccaccgcatcgcgctcgcccgcgtgctcttgcaggacacgcccgtcatactgctggacgagcccaccgtgggcctcgaccccgccactgagcgcgcgctgctgaagacgttcatcgagaacgcggagggcaggacgctcatcatggtcacccaccacctgcagggcgtgtccgccatggaccgcgtcgtgtttgtggaggacggccgcatagagatggagggctcgcctgccgagctcgagcgcacgagcgagcgctaccgccgcctgctcgccttcgactccggggtggccgccccggagtaaggcgccccgggcgggtaacggcggacggacggatcgctttcgccgtgacgcttcaacagccttccttgattcacgcgttcgcatgaatttgtagtaatgcgagcatatttcacacgaacgcgtgaaacgaaggagcagcgataccgagtttcgcaacactcgagaagctggcgcgctccgcggccgccacgctcggtcggaagcccttccccacgcgcaatgattcgttgctttacgcgtggcgcggcgcatggttcaatgggtgcacggcgggaaggccgcctgccccgatgaaaggatgccgcatgagtgttggagagacgcttgcccgcatgcgccgcgagcgcaacctcacgcaggaggacgtggcgcgcaggctctacgtcacccgccaagccgtctcgcgctgggagaccggcgagaccgagccgggcgtggacatgtgcaagctcatcgccgccacgttcgacatgccgctcatggagctgctggagatgcccgacggagactactgccaaagctgcggcatgccgttctaccaggaggccgaccacggcagcgaggcaggcggcggccgttcgcgcgacttctgctcgatgtgctacgaggacggcgcgttcgtccgcgacgagaccatggaggagctcatcgaggaggccgccccccacatggccgccgcctgccgcatatcgcgcgacgaggccgtgtcgttcatgggcgcgctgcttccccacctcaagcgctgggagcaggggcagggccggtaggggcggcgcaagcgggccgctcccccgttgcgagcggcctcacggcgcgcatctcacggtagccggccgcaggatcgggctcgtactgcacgcgggggtggtcgtcgtcccaggcatagccgatgacggccgggtcgtagcggtccatggcgcgctgcacggactccatggcgtccacgaagtcctcctcgcggaagggctcgccctggaacgagaggtacgtggcggcgggcaggtcgaccacgtcgaagccgttgggcacgggtccctcgaagccggcgggcatctccgcgccctgcacgtacaccgacgtgccggcggggcggaagcgcggcggcagccacaggctcaccggctcgccgcccagctgctccatgctggtgacaaggccccacacctggcatcccacctcctcgccgtacgagaagtagtcgtgcgccgacacgccgcgcttcagcaccacgcggcgcgccggcttctcgatcgtctgcaccagcacgtttctcgccgcgttcgcaggggcgggcacgtgggcgcggcgcagctcgtcgaacttcacgccgtaaggcacgaacaggcctatggggaccgggtcggccgcgtaggcgccggggttgcagccgaactcgcggcgaaacgcccgctggtagccgtccacgctgccgaaccccgactcgaaggccacgtcggccacgcgccggccctcctcgcgcagccgcgcggccgaatgcgtgaggcgcatccggcgctggtagtcggcgggggtcatgcccgtgagccgacggaacagccggtaggaatgccacggcgagaacaacgacacggcagcgaggtcctcaagggtcacctcgtcctccacgtgctcctcaaggtagtcctgcatccgctgcactgcctgcacctgctcgttcacgccgcacgcccctctccgccgttcgctttccaccacccgacgcctgcacccgtccactctaccggacgcacgcgcgggcgctcgaccgtttttgccctattcccaccggaagaaccgaaccgccaccgccgtgcacgccacgaccaccgctgccagcacggccagcgtgagcagccagcctccgaggaaggcaggccatgatccgctcatctgcatgccgaacgcgagcgtggcgcgtgcgcgctaccgcccgaggaagcgctcccaggcgggcagctccgcctgcgcctgcgcgcggccgcgccggaagttcgcctggagcctcgcccggtcgcgctcggtgttggccacgccctggtcgttcgcgtagaacacgtaggcgcggccctccgcctccagacgtgcgaggcggtcgagctcggcgttgtaacgacgcgcccaggtgtccagagccgcgcgcatggcgggacgccgccagaagaacacgtcgtagaggcgctgggggcgcgtccggcgccggaaaccgcgagggcgcgtgcacacgacgaagaagcgccgcaacccgtcggcttccgcgcgcggaagcatgatgccggcgccgtcgccgatgccgccatcgtacagcgcccgtccgcctatccaggtgggaggcaggatgacagggtagctcgtggaggcgcgcacgcgctccatgagcgcccgctcgtcggggaagtcccggcgcgtgaagtaagccgtggcgccgctgtcgcggtcgatggcctgcagcgtggcgcgcgccgggttcgcctggaaggctgcgaagtcgaacggaagcgcgtacccgggacgtgcgagcgcatggccgtgcagggccgcgcgcacgccgtccgcgcccgcgaacggcgctatccaccagcgcagcgacaggtcgtcgagcgatgcggtgaacgacgcctccgcccgccgcacgtcgcgcgacaggtagtcgatcgtgttcgtcgcccccgcggagagcccgtacacgtcgtcgaagaacagcccgttctccaacatgaccgcaagcgccccggccgagtacgagttccgcatcccgccgccctcgaagatgagggcaacgtcgcgcaccgtgctctccatcgggccgccctcccttcttcccgtcgccggaacagtgcctgcgcgcctcacagcgccgcgacctcgcggcggagcgcggcgaggtcgggcgccgggcccacgaggcggcggtacaggcgctccacctggccgcgcagcgctatctcgcgcgcctcgctcagcacgaagaacgacacgcgcaggtacagctcgagttcttgggcgctttccagctgcgcggggtcggccgaggggcgggcctgccgctcgtccacgagggcggccagcatgcccttcgtcacgcgccgcatgcgcgcaaggctctcctttcggtcgcggtacgcccggtactgcggcaggaacagcgccgtgcacacggccagcacctctgcgcacgccgtgaaccactccggcagcgacccgagctccatggctcctccttttcgcaagctctttttgagccactatagaagcgcctgcaagatggtacgcactcacggacgcattcgtcacacccccgtggtcaccgcaagcccgcaggagcccacgccgccctgcgtgcacggcacagattcagtgcgcgttcgcttcgtgccgatgataagatgaattgcgaaaacccacgcgacagcgaaggagcgccatgcccatgccgaactacgacggccgcgtgttcgtatcactcgaaaacacggagaacggcgaagtagacgaacggacgcgattcgcctatcaccaaaacggcttcagcgtataggccgattatgcgggcggcgatatagtgcgcggccaccttgtgggcacgacggatgaagatggtcgcttgcatttcctctatcatcacctgaataccgcaggagagctgcgggcaggcgaatgcaacagcattccgcagaagctgcccgacggccgcctgcggcttcgcgaaacatggcgttggctcaatggagattgctcggctggtacctcgatcatcgaggagcaggcgccgggcaatagcggagtcgaacacgacggctagagaccgagcaggtcgcggctcgagtgcgcaatgcgctccgcaagggtttcgggatcctcgcggcgcaggcgggcgatctcgtcgagggcgccttccagccggcgggcgaactcccccgccggcacggccgggccggcctcgggcggctcgtcggtttccagcagcaagcggtctcgcgggatggcctgcgcgtaggcgcggccgcgcttcgaggccagcatgtgcgggcccacggagaagaagcagccgagcttcgcggcacgctgcagctcgtcggacgtgccggagaaccagtggaagaggcaggcgccgccgtcgaggacgccgtggcgctcgaggacgtcgagcacggttcccgccgagcgcacggcgtggatcgagagcaccttgccgccttccgccgcgcaggctgcggcgatacggtcgaacgccgccacctgcgccccgcgcgtcgccacgtgcttggggctgaagtcgagtcccacctcgcccacgtagcgcgacgcgcctgcgttcgcggcggcgcgctcggcggccgcctcgcccgccggcccttcttccacccaccagggatgcagccccgcccccacgcgcacgttggggcacggcgcgagcagccgcgcggcccggtcgaagcccgcaggcgtcaccgtcatcgagagcgcgaccgtcccgcatgccgccaacccgtccgcaagcgcgcgcggatcggcgtcgaagtccaggtggcagtgcatatcgaacaggcgatacctcatgcgcgcccaatcccagccagcgtgcagatcacctcgccggcgatcatctggcccatgatgggcggcacgtacgacgccgtgccgaggttcgaccgctcgcggcgcgcggcgccctcgcgcacgggcacgtccaccggctgctcgcacgagtacagcacgcgcaggctccggatgccgcgcttgcgcccctccttgcgcatgatgcggcagagcgggcagttcaccgtgtcgtacacgtccgccacgcggaagcactcggggcgcagcttgttcgccgcgcccatgctgctgatcaggcgaagcccgcgctcgtcggcgtactgcgcgatggcgagcttcgccgatatcgtgtcgatggcgtccaccacgtagtccacgccgccggcatgcgcggcgatgaacgccggcacgttctcggccagcaggaactcgtcgatcgcctccacctgcgccgcagggttgatgtcggccaccatcgcgcgcgccacgtccaccttcttgtgcccgatggtgctgtggaacgcgatggcctgccggttgatgttgctggcctgcaccacgtcgtggtcgaccacgaccagccggcccacgccgccgcgcgcaagcgcttccacgcagttcgagcccacgccgcccacgccgagcaccatgacggtggaatccgcgagccgcgccagaccgtcgcgccccatgatcagttcgagtttcgaggtggcggtgtcgccggttgccgtcatgcgcttcctttctgtcggcgaccatggtagcaccgcagggtggccgaccgtccgaaaagccgccgagagcccatcttcgcctcaaaaacacgattcagccaccgaggcgtgttttattgcgaagatgcctccgaggattacgtctgcgcgcctatccccaagcgcgcaaggtcggcgacgaagcgctcgacgggcaggccgaggccctcgaagccggccgccttacagggcattcgctcgttcgccaggcggcacagctccgccggaaacggatcggccgccgcgtcgagcgcgagcgggagcgccagcagcttgtccaccagcacgttcatgaacgcgacggaacgccggccgtgcgtgcgcgtgacctcggccgcgccggcgaggaaccggtacgccccgatcgcgtcctcgtcgaaccccgaggcggcaagcgaggcgcgcaacgctgcgagcgcgacggcctcccaatcgcgccaatcccccggctgcatgcacgcgaaggccgcgaaccggttgcacgcgttcgccagcagcagcacgtcggccccgccgagcgccacacggtgcgcctcccagcagaagagcggctcctccggctcgccgtaaggcggccgcgcaagccgcagatgccgctgcaacggtatggtgatgcccagctgcaccgctccgcctcctcctttcccgcagcgcctcagccgcgctgcagccacgcttcccaggcgtcggcctcgcgttgggcctgggcgtagccttggtcgtaggagcgggacagcttcgcgtgatccgtctcccggttcgataccggcatctcgtcggggtggaacacgcaggcggcgccctcgcgctccaggcggtctacctcgtcgcagagggcgttgtagggccgccagcgctcgatggtgcgctcggccacctgcggatgggcccggaaggcggtgcggaacagcgccgccgcggccggccgcggcggcttcttgcgatagccgcgcggctgcgagcggatgataaagaaccgttcgaacccgtcgcggcgcgccgcgtccagcaggatgccccggctctcgcccaggccgccgtccatgaacgtgcgcccatcgattaccgtaggcggcatgaacaggggcatggtggagctggcccgtacccgcagcatcatgtcgcgaagcgtggggcagtcggccttcgtccaggccaccgtctcgccggtgtcccagtcgaagccctcgatgtgcacgtcggcgtcgctggctgcgaacgtgtcgaagtcgaacgccatcacggcgtccgttcccgccagctcctcggcaacgccctcgtacagatacggcgcgttgaagtagccatgcccgcgcaggaagctgccaacaccgccgaagcgcgggtcgcgcacgagatcgacgaacgacgccttcgtgcgtgcgatgtcgcgcgacacgtagttcaccgcgtggctcgagccggcggagatgccgtacacgcgcccgaagtgcagctggcgctccagcagcgtgaccatggcgcccgccgtgtagctggcgcgcatgccgccgccctcgatgacgagcgcgacgtcggatatgttggccgtcagggtgcccatgggagtattatagccgtgccgcgggctctcctgggggatgcgataccgcggcgtagccgaacgagatgagagaggaaacgctaccatggagaagccgattctgtattactgggccccgtgccccacctgctccgtcctgacccatttcgccgaagagcacggcatagagctcgacaagcgcgacgtggagcaggaggcaccctaccaggagctcctcgagctgggcggcaacgccgacctcatcccctacctgtgggacggcgaacggctcgtcaacggcaacgacgagtgcctggcgtacctgcgcgagaagtacctttaggcagcgggcgcacccgagcaggggcgcccccgcagcgatctctcgcgcagggcgccctcgctcccgccgctcaccgggtcacggcaaccgcggcgctgcccgagctttgggtcgccgagctttgggtcgagctggagggcgagccgcccgaattcggctgcgaggcggaatcgtgcgagccgctgccggactgcccgctgccgcccgatccgctgctgtcccccgtgctgccgctgccggagccgtccgacgagcccgacgagcccgacgagtcgcccgagggacccgaggaacccgacgagcccgaagatcccgaaccgcccgacagcccttggtctccgcccgacgacgagttgtcgcccgacgagctcgaggacccgttcggcgccgtgtccttcgaagggtcggtcgtggaggaatcgttcgagcccgatgactcttccttgtccgccggctcatccgaagcatccccgcttcccgaggagtccgacttctgggcctgcgatgacgaggggatgaggggctgcgtcttcgcgcccacgccctgcccggtggtgacgaggtcgatgacgagggcggacagcgcgacggccacgatagcggacgcgatggacaccgccaccacacgtcgctgcagcttcttcctgtgttcgcggcgctcgcgcgcccgctgcaccgtggggtcgtcgcgcaggccggcatcgtcggcgcgcggcgtgcgcgagcgccgcgccgcctcgcgcgactcgatggagtcctgcggcgagaggcgcgccgtcttctccgactgcgggagggttgccgtcctccccgccgatccggcagcatgccgggcggcggtccaccccgacgggtccggcccttccgcccccgcatcgtccgaggcgccctttgcgggaggcacgtagccggtctcgcccggcttcagctcgcgcagcttctcggccgacgcggtgaagaacttcttgtacagctgcgatgccaccgccgacacgacggagcccacgcccacgccgatcacggagccgtagatgcctatttgcgaggccagcagcatggaggtgacggccgccagcgcaccggctacgacctgcgccaccgacaggtcgtcgaacagcctgcccctcttcgccttcccgccgcccgcatctcgcgccatgccgcaacctcctgttcgcctcgcgtccgttccggggccctcaccccatccgaacataccgcacgcctgtggaaccctcgcgcactccatccaatcgttatcagcacgccacagaacatgcaccgctttcgcttgtcctcagctggcaaaggcgcgcgactggtatcatgcgaaaggcgggaggggtactgctcggcccgcgtagaatcgcaacctagggaaaggaaagcacatggaagcaagcttgctcgaatggacgctcgtgtcggaatgccctatcccccaggatgtggcgaacgtgctcgtgcagggcgagcagcccatcgccgcgtacaagacgctgcgggattcggccatcttcaccacgaagcgcttgatcgtgcgcgacgcccagggtatgacgggcaagaaggtggaaatctactcgctgccgtggaagtccgtggacatgtggtcgtcggagacggccgggcacctcgacctcaacaccgagatggagttctggacacgtgcgggccacatcaaggtcaacctgaagaagggcctcgatatccatcggctcgacaacatcatttcccactgcgtgctggggctgtaggcgccgccccagcaagccgccccccgacggtgcctaaaacgggtccacgtagagccgcatgccgtcgggcaggcggacgaggcccgcccgctggaggacgtcggcgaacggcgtgtccagcacgggccggccgttgaacgtctccaccacgaccttcttgcgggcgccctccgccccgtcgcgccgcaccgcacgcgccgcgtgggcgacgagggcgcgagcggcctcttcgagcgccgcctcgtccgcggtgaaggccagcacggagcgcaggctcgccgcggcgtagagcaccggcacgccgtcgcgcatggccacgaggctccccggccggcgcgcggggcgcgcaaccgagggcatgccgtcaggcgaggcagaggaagcggcgccggaaggagccgtaggcgcggtagcatcgccgctagcaggggcttcagatgcaggagcatagccgtcagcgaggggcggccacggcaggccggccccgaacaggcacgcagggtcgtcggccgccagcaccgcgcatccttcggcaccggagcggccgtcccgcgcatccccttcggccgcataggtgcgcagcaggtccaccgtctcgcgggcggcgaactgcgccgggccgaggccctttacgaacatgccgcgcagaaggtcgccggcgtcctccatcgaccgcagcaccggcatgagggcgcccaggccgccgggtacgccggagagcagggccacgtcgcgcgcgagcacgccgtaacggtcgaggatcgactccaccagcgccacggcgcgcacggtgtcgttctccggcgacggcgcgagcagcgaccaacggcccgagagcgccgcgcctgcggagccgacacccaccacggaggcgcgctccgcggcctcggcctgcagcccgccggccgcagcgccgcggtagcgcgagcgccggctgcctgcgcggcgcttcggcgcggggcgcggacgcgtgcccgaggccgccgcctcggccgcacgcaccggcgcgaacgtgtcgttcgtggcgcgcccgccccacaccagctcctgcagcgccgcggcgatggacgcctcgtcgacgcgctcgggctccatccggcgccgcaccgcatcggctatctggcggaagaacagcccgtagccgctggcgagcgcctccacgacggcctcctccaccgacgggcgcacggccggctcaacgtcctccgctccggccaacgccgcatcggcctgcacgggcgcgagcggcgaatccgtggggtagaaggccacgagcgcaggcgccgcggcagccttccccgccttgcgcgcccgcgggcccccgtccgccggcggggcgccgtcctcgcggcgtccccccgcccacaccacctcgcctgcggcgacgagctcgtcgagcatcgaaggccggtagtcgcgcacccggctggggaacacgtggccctcccaagccgcggccggcaggaacacgccctcgaactgggagatgacctgagctaccccttccgtcccctcgagcgctcccccgctcgtgcccgctccctgcagatccagcacgtagcgcgcataggcgctcgcaggcaccgcgcgcacggcggcgcgcgccttcgcgagcgagcgcgagcgcaggcggcggaacacctccgccgacacccaagtgcgctcggcctccgtgatcgcagccacggccccgacgcccgcaggccccggcccgtccgcgcagccgaaccggccctgcacgaccttgccggccgcaactaggcggcgcaggctctcgcgcgccaccgaaggcccgatgccgaggcgtgccgccacctccgcctccccgaagggaccgtgcgtgcgggcgtagcgcgcgacgaggccgtccagcggtcccgggccgtcgcccgcgtccggcacctcgaggaacgctgcgggaacccacgcgggcgcctccgtccccagcgcctcgtgcaggcgccccgcatcctccacggccgcccagcgctccacgccgccgatcatggccgggaaggcgcgcttcgcgtcgcgcagctcctccagcagggtgcgggcctcggcaggggtggcagaacgcgaaggcgtgggagcggctgccgcgccttcgcaggtttcagctggcgaggcgtttgagccttcggccgcggcgtcccatgggcgctcccgcccggcgacgcggccggaagcatcggcatcgcactcgtcttcttgcccgggtccaggcgatccccccggcgcctccagccgcgcggccgcctcttccgccgtgagcgggcccagcacgcgcagcaggtcggccgcgccctccgcgccgcgggcgcgccggtcgggcgccaggcgctgcagctgcgcctctacctgggccaccacctgcgggtccagcagctcgcccaggtcggccgagcccaagagctcgcccaagagcgccgggtccagcgacagcagcgacgcctggcgctccgcgtgcggcaaatcgccctggtacaggtgctcgcccacgtagccgaacaggagcgggccggcgaagggcgacgggatgctcgtctgcgcctccgccatgcgcacggtgcccgccgcaagcccctccatgagctcgtggagcgcatccaggtcgtacacgtcctgcaggcactcgcgcgccgtctccagcagtatcgggaagtcgcgctcgccgcgtgccgcctccagcaactggcccgccttgaggcgctgctgccacaagggggcgcgcttgcccggctgcgtgggcgacatgagcagggcgcgcgccgcgcactcgcggaaccgcgcggcgaagagcgccgtcttgtccacccggtcgcgcacgatgcgcacgagctcgtcggggtcgaacgcgaacagctccgcccccggcaggcgcgtctcggtcatgggcacgcgcagcaggatgccgtcgtcggcggccatggcctgcggatcgaagccgagcgtgcgctccacgcgatcctgcaccgccatggcccacggctcgtgcacctgccggccgtagggcgaatgcagcatgacgcgccagtcgcccgtctcgtcctcgcaacgctccaccacgagcgtcttatcgtccggcacgacgccggtggcctcgcgctgtgcgcgcacgagcgcggccaggttgttctgcgcgtcctcgtcgaggcctgcagccgtcagccgctcgcgcaaggcggggtcgaggcgcgaagccgcatcggcgagcaggtccgcgccggctgcagccgcacccgccgcccctgcgagcgccttgtccgcgccggcggcggctccgtccccaagttccccgcccccgaccccctcgtccaggccggcggccacggcgcgcaaaaacgccccgcgcgcacgcccggtctcggcggggcggcccacgccctcgccgtgccagaacggcaaacgcgcagagcggcccggcgcgggttccacaatgacgcggtcgcgcgtgatctcgctgatgcgccacgagctggtgcccagcgcgatgatgtcgcccacgcgcgactcgtacaccatctcctcgtccagctcgcccacgcggcgacggccctcgttgccgtcgccctcgggcagcaccaccgagaacatgccgcggtcggggatcgtgcccgccgccgtcacggccagccgctgggcggcgggccgcggcgagagctccccgctctcgcggtcccacacgatgcgcggcgcgaactcggccaggtcggccgaggcatagcgcccggacagcatgtccagcaccccgtcgaacgcgcggcgcggcagctccgagaacggcgccgcccggcgcaccgtggcgtaccagccatcggcggtggcgcctcccatggcaacggcggccaccgtctgctgcgccagcacgtccagcgggttgcgcacgagcgcggtggcctcgatggcgccggcgcgcatgccctcggccaccacggccgcgtcgatgacctccgtgcgcgtgcgcggatagacggagcccgtcgaccggccgcccacctggtggttcgcgcgcccgatgcgctgcaggccgctcgccaccgacggcggggcggccacctgcagcacgaggtcgatcgaccccatgtcaatgcccagctcgagcgaggacgtggccaccacgcagggcagctccccggccttcagctcgcgctccacctgcaggcgcttctccttcgacaccgagccgtggtgggccttcgcgatgatctcgggcgcgccctgcgccagctcgctcgtggaccccaggtccgagcgcaggtgcgacgacggcccgccgtccgcctggccgccgggcgccatgaggccctcgcgcttcgcgtacagctcgttcagccgcgcggtgagcttctcgcacagcccgcgcgagttcacgaacacgatggtggtgcggtgcgccagcacctcgtcaaggatggacgcctcgatgagcggccagatggacgacgtgcccgcacggctgtcgggcgtggctccccggggcttgtcgccggccatgagcgagcgcagcgcccggtcggacttccacgcctcctcggccggcgcgcggcgcggcccgccgccccggccggcgcgcagcccgccggcgtcggcgccggggaaggccgggatggccgtcatgtcgcgcacgggcaccaccacgcgcacgtccaggtcgggccgcccctcggcagcgatcacgcgcacggggtgcggcccgcccaggaagcgcgccacctcctcgcgtgggcgaaccgtggtcgagagtccgatgcgctgcgccgggcgttccagcaggtcgtccaaccgctccaagctaagcgccaggtgcgcgccgcgcttgttgccggcgagcgcgtgcacctcgtccacgatgacggtctccacgccgcgcagcacctcgcgcgccttggacgtgagcatgaggtaaagcgactcgggcgtggtgatgaggatgtccggcgggttgcgctggatggcccggcgctggtcgggcgtggtgtcgccggtgcgcatgcccgtgcgcacggccggcgcgggggcaccttcgtcggcgagccgccgcgcgatgcccgcgagcggcgcctgcaggttgcgctccacatccgccccgagcgccttgagcggcgacacgtacagcacgcgcacgccccgcggcggcttcgtggcagcggggcgtgccttctcgcgcatgagcgcgtcgagcgcgaacaggaacgctgccagcgtcttgcccgacccggtgggcgcgatgacgagcgcgttctcgccgccctccaccgcctcccaagcctgctcctgcacgggcgtggggccagccggaaacgcgtcgaggaaccaaccgcgcacggcttcggagaaccgcatgagggcgtccggagacgggcgggccccattgtccgcgcccgctgcagcggcgcgcgcggcctcgtcctcggcacggttcccatcgtccatggcagcccgtcgcccccttccggctatcgtcgtgcggtcctgcccatcttaccgcatatgcaccgtgcgaggcgcccggccgccccggccgttgcgaaaccttaggacgcgcccaaacgcctattgcagaagcgaggggggggggacggcatccacccccccccgacgtacgcccgcgcagccatacccgcatctcgcagccaggcccgcagcgcagccgcagccgacgcgttctccgcagaacactccctacacagcgatctcgaagccctccgcgtccagctccggcgcgccctcggcccggcggcgctcaaccaggcgccgcgcggcggggatggacgccagcagcgcgagccccatgaccacgctcgccgcgatcaccatgatccacaccggcgcgaacgacaggtacgcgtcgaagatcacgcccgacaccaccgcgcccacggccgcgcccaacagctcgaacgccgtcacgatgcccgtgaccgtgcccaggtccttcttgccgtactccttcaccaccatgatgggcggcgccaccgtgcccatgcacgtggcgaacccgaagaacaggcaggcaagaataggaccccagtccgttgccgggaacagcagcatgacgccggccaaaaccgacgtgatcgtgcccaggatggtgcccatgcgcatgccccagcggtcgtagatggcgccgagcgccaccttcgccacgatgaccacggccaggtagaacgaccacaccgagcccgcccacagggtggagtgcccgccggtcaccacctcggtgccgcccacggtcacgctcgtcatgttggcgatggagttcgtgatgatgcacccgttcgtgatgcccatggccacgaaccccaccaccaaaagccagaacgcggcgctcttgcgcagcggcttccatcccaccgacaccgtgacgggcgcatcgggcgagcggtcggccttggcctgctcggtctgcccggcaccgtagggctcgaggcccttctcgctcgggcgcgtgcggaacgccgccaccgccagcggcagggccgccacgaggcacaccacggccagcagcaggaacgccgcgcgccagccggacgcctcgatcatcgcgctcgtggccggcgagagtatcacgccgccgatgcccgaccccgaaagcgcgatggacacggccagcccgcgcttcagcgtgaaccagttcgagatgatcaccgacaccagaaggcgcgtgccggccaccaccaccatgcccgccaccacgcacagcgcgtacagctgccacacggcggtgatctgcgacaatcccacgagcaccaccgagctcgtgagcaccgtgaccgcccccagcacccgcgcggagcacttgtccgtgagcttgccgatgacaagcgacgcgaacaccgccaccacggtggtgatggacacgcccgtgttgaactgccccaccgtgaggcccaggtcctccacgatgtgcgtctggaacagcgggatgcagttcacgaacaccgtgtagcaggtggccatgatcagcaggccgccgatgacgatccaccacccgtagaagaacttcccctgtttacgcccctgatcggccatggttcctcatttccccaactggtcgagatgccgtatgaactccacgtagaaccccaccccgcgcttgaagctgtccacgtccaggttctcgtcctggccgtggatgcgggctcgctggtcgcccttgaacaggaagcctgcgaagcggtacgtgcgcgggcagacgcgcgcgaagtggcgcgcgtcgctgcagctggactgcacgtagggcgcgataccggcctcggggtacacggcgtttatcgcgcggcgcaggtagtcgaaggcggcgtcgccctcgaacggcgacacgggcgacggctcgctcacctcgaaggtcgagaactccgtgcggccgtcgaagcgctcctcgatgcgcgcgagggccgccgccacgccctcgccggggtccacgcgcacgttcaccgtggccttggcctgcttggggatgatgttgtgcgccggcgcccccgcgagctgcgtgagcgcgtaggtggtgcgcaccatggccgccgtctcggggttgcccttcatgatgcgcaccaccaggcggcggaagagccagaggttgccgaacacgatgcgcagcgcgaagctgccgtgcgaggccagctcccgcagcatggccgccaccggggccgacagcgccgcgcgcggcgggttcttctgcagcgcgtccagccccgacacgagcttcgccgtggcgtcctggagcgtgggcgtggccgcatggccgccgtcggcgttcgtggttatgctcgcgttgaacacgcccttctcggacacgcccaccacggcgaacgggatgtccacgccgagcggcgggttgtcgatgaccgcgccgccctcgtccaccaccatgtacggcacgcgcccgatgcgctgcaggtgctccaccatgtggggcgccgtgtcgccgccgtcctcctcggtgttcgacgagaagaagtacacgtcgcgcgggggcgtgaacccctcggctatcaggcgctcggcagcctccatgaggccggcccacacgcacttcgtgtccaccgcgccgcgcgcgtagatgcggccgtcgtcgatgtccgccgcgaacggctcgtgcgtccagcccacggggtctgcgtccaccacgtcgtgatgcgccatgagcacgatgggcgcgagctcgcagttggcgcccttccacagaagcgagatgccgcggccgtcgatcagctccagctcgcaggcttcgaacacggccgggtacagccggcgcagcgcgggcacgaacccgtcgaaggccgtgcggtcggcatcggggttgcgcaggtcccacaccgtggggatgcgcagcaacgcgcggaagcgctcgaccgcggcgtcgtcgcccgccgccgcggacggcggcagcggatcgggcacgggcgttggcttgagtcgggcggcgttcgccacgaggacgaccgccaagacggcgaccgccgccgccagaacgatgagaacaaccatggaaccccctccttggacgcccggctcgtgcaggcggccgacagccccgccccctgcggcaagcgcagggggcgggggcgatgccttgtgctgccggccattatacgccctgcgcagacggttgcccggctactccttgtctctcagttcccttagccttcggaaaaacgtcgagacgctgataccgagctgcgctgcggcctcttcggcgctcgcctcgcgcgcctcatacgaggctatcgtttcgcgtagcaccagctcatcgatcggcttgcgcttacgaccatgataggcgcctcgctcggcagcagcctgcacgcccgaaacacgagccttttcccggtagcggtaggccttctcgtacaggggcaagagcactccatgcagcgccgcccgaccttcagcggagacgtcctcgccatccaaaacaagtccgtcacctcggcacagcgcaacgagcagcaccctgagagcctgctcggagctcaccgcacgcccgatcgatcccgatacgtcgacgcaagccgcgccgccgtcttcgcgagcctctcgaacgtaaagaccgtctccgatgtagcgtgtatccgtcctgataagccactcgattttgtcaaggtactccatatccaatgcatcgagaagccgccagagatcttcgcgattctccgaaggagcccgctcgctcacgaatgtcggagtcaggttttcgcgaacatattcttccttgcgcaacgagagatcgaatcccggaacgccctggaaatccggcggttgcagcaagtcgataaccgcccaattgggcacaaagacgtatcggaacgtctcgtcctcgcgcaccgtgcacgctatcgttcccacgtcataaaccaagcctcccggcccgtccagacttatcgtgcccttcgtcgttttttccttcataccttcctccccgcaagcgccgcataggacgtttcgagaatgagctcaagacgcgcttcgatgatatggttgtaaaagtctcttcggcgatcgcttatacccggcaccgatgctatcagccgatggatcgagctgcggtcaacccgccccaagacgctctgcaaagcgcgattgcactcgtcgaattccagactcgctataacgtcgtaatacgagcttttccgacctcgcagtcgaatttggcttgtggggaaccggtacacccgtttggccgtctcatcttccgaatccatgatgtgcgccatctcgtcctcgtcgacaaggctgggaaagaggcacgacccgttgtcgaaaacgggcgcgagcgaataagcgccgccttgcttgataaacccccaattcgagccatggcggtcgaagttgccaaccaaggcatcgacgacgaacatctcccaaaacatgcttatggttccggatacgtcggtgagcttggagttgtcgcggagcatctgcatgatgtcggcatattcgtactggtaccgctccttgtcctgatcgagcgtgctctcacccacctcgttgaaggggacgaactgctccccgatcccaacgaaactcttgcaggcaaccacctcctcacccgcgaacgtaccgaggaaagttttctgcacatcgaacccgagcaattcgaaaatatgagatccaaggtattccgaaacatggttgaaccgtgcgccgaacggcgttctttttcggaactttatcatgtactcgctaaacgttccatccccattgggaacgcggacagactccttgcgctctgacccgccgtagtttattgcgccacgttcgaattgggagaagtcgattatgtccagagcgctcataggcaatcactctcattaatgttagatttactatttgatagtatactatgaggaagagagactatcaaaattaatttctattgttaatgatagtaatcggcggcgtgaaaggcgcgcgacaaccttcgacctccttacggcagcgccaccagcaggcccagaaccaccacggcaatgccgctcaacaggttcacggcgtcgttcgtgacccaggcgtaaccggacaccagcgtgtagcctgctgccccgcgcgcgggcgcggcctccacgagcgccccgtcggcggcgagggccgcggcgccggcgccggacagtgacccggcctcgacggccgcgccggggtcgccgccgtcgccggccgggccgcccgcgcccgagccgcccggcacgcggtacttcgcctgcagcagcacgcccaggtagctgtccaccaccgagcccacgatgccgcatgcgatgacgaacaggaacgctgtcggccccgcaggcaccgcgaagccgaacgcatggaacagcagcatggccaagaaccccgagctcacggcgcccacggccgtggccgccagcccaagggggctcacgccgcccgaaaggccgcgctgcataggctcgcgcgtgactatgttcaccggcggcttgcggctgtacatgcccacctcggacgcccacgtgtcagccgtgctcgcggccagcgcaccggccgacacgatgaggaaccatgcctcgccggtggccgcgtacgccagcgcgcacgcgagaaacggcacgctgttcgccagcacctggcgcagcttgcgcgggccgccgcccttctcggccggatgcgccccgcgcacccgccgtatgagcttcgaagccacgttcgagctgccgaagaaccacatgagcagaagccacagcggccagccgccgaacacgaaggcgagcacgcccacgaccacggctcccagcgtccccggcacggtgagcagcccgagccgcaacgcggccagcgccacagcgccggacaggagcaagcccgcaagcgccggcgtgaaggggctcgcgggcaggaacagcaccgcgtacagccccgtcacgcccaacggcacgctcaggttgtcgagccccgccggcgacacagcctccagcgccgtagcggcaacggccagccccagcgcggcgagcacggacgccgccgcaacgcccggcgtcaggcccgcgcccgccgccgggcccgccgcgaaccatggcaccgcgccctcccagcccgccgcggcagccgccaacagcacgcctgcgcacgagacgaagctcacccccagcatggcggcgctgcccgcaagcgacttcccgtcgcccgcgcccggcagcgggcggctaccgaagcgcctgcccagcacggctgcaaggccgtcgccgaacgccatgcagaacacgccgagcgcgcctgcgtacggtgcgcccaggccgaacgagaacagcgcgagcaatgtgagcgacacggcgtagtacacggttcccggcgtgtcctccccctcgccgcgcgccgtgaaggcgagcttctgcctgcgccaggccagcgcgttcaccacgatgaacgcggccggcagcgcagccgcccaccagggcgaggtgaaggacagggccgcgaccacccaccagccgcccagcgctatgtgcacgagcttgcgcgtaccctcctcgcccatcccgcgccgtgcgagcaggctcgaagccgccagcaccgccaagacgtacacgagggacagccccatccccacggcgttctgcatgaccgtcacctgccttccgcggccagcgccgccttctcgtcccgcgcgagcagcgcccgggcctcgtccacgagcgcggccgcgcgctccttcgtcaccgcgcttcgccgctcgaggcagctatagccgtcggcgcgcacctggtccatgatgccccggtacaggaacagcgacgagagcgcaggcagccggctgtcctcgtccagccgcaggatatcgcgttgcaggggcaggtacagttcctcggacctccgcgccacgcgctcccatgcgctgcggaaggcggcattcgcccggtgcgccgccagatcgtcgcgcgtgaggccggcctcctccattacggcggcaggcaggtagacgcggccggcgtcccaatcctcgcccacgtcgcgcaggatgttcgtgagctgcatggccacgcccagcgccacggcatccgcccgcagcgcgtcgtcgacgggccgcccggcgcgcagcagcggcagcagcatgagacccaccgaacccgccacgtagtagccgtagtcctccagctcccccagatcggcgggttggcggaacgacaggtcgcgccgctgcccctccagcatatcgaagaaaggggccgtgtcctcgtcgaaggcgccgaacaccacgcccagagcctgccacagcggcccgtgcggcatgccgccggcgtcgaaccgctccaggtcgcgctgcaggccgtccagccgctcccggctggcctccacatccacgcagtcgtcggctgcgcggcagaacgcgtacacggcatacacgcccttgcgcttgcgcgggggcaaaagcgagaacgcgcggtagaagctgtgcgagtttcgcctgatcacatcttcgcaccaggcgaagtcgtccgcgtgctcctcgaacgggtcgcgtgcggcgtacatcacgcaccgccttccgcatcgccgggcaccgcgcgggtcgcggcgcccggcgcgcctcccggcgccaccgagccgcctgccgcggcctcggcggcggcaccgcgcgcggccaccacggccacctggccggccacctcgcgctcggccgaggcggcctcggcgtcgtcgcgcaggagctcctcggccgccagccgcgcgctcaagagcacgatgggcacgccggcccccggatgcgtgctgctgccgcagaagtacaggttgtcgcacgcctcggccttgttgtgcggccgccagtagttgctctgccgcaacgtgggccgcagcccgaacgtggcgccccgggcggcgttgaaccgctcggcgaagtcgttcggcgtgaagacgcgctcgaacgctatgtggtcgcgcacgtcctcgtacaccgtctcccgctccaccaggtcgagcacctgctcgcggtacgcggccacctcttccgcaccccatgcggggccgccctccgccagcggcggcaccggcaccagcacatagagcgtctggcagccctcgggtgcgagcgacgcatcgagcgagcacggcgcgtagcagtagaacgaggggtcgtcggggaagcgcccgtcgtcgaagatgtcggcgatgttgcgctcgaagtcgggcgcgaaccggatggagtgcaccgcctccgccgggtagcgcttgtccaggcccaggtacaggatgaagcacgagcacgagtactccatgccctcgagcttctcgtcggtgtagcgcccacgggcctcgtcggccagcaggttctccatggcgtaggggaaatcggcgtcgcacaccacgtagtccgcgcgcaccagctcgccgcctgccaccacgccgacggcgcggccgccctccaccgcgatgtgctccacgggcgccgacgtgtgcagctcgccgcccatctcctcgaacaggcgcgccataccctcggccatggcgtacatgccgcccggcatgaaccacacgccgtacaggagctcgatcagcgggatgatcatgtacagcgagggcccctcgtacggcgagatgccgatgtagagcgtctggaacgccagcgccttgcgcagccgatcgtcggacacgtagcgcgacaccgacgagtacgcgtcgcccagcgtgtgcaggcggaagccggcgatcaggctcttcgggttgtagaagtcggtcggcttgcggaacgggcgctgcaggaagttgtccttggcaatgcggaagcgcttgtaaagcagcgccaggtactcgaagtagccctgcgcgtcggcctcgctcacgccctcgagcgtggccgtcaggtcggacaggtcgttcgacagccgcacgcgctcgcccgggccgaaggatatctccatgagcggctcgaccttctgcagggggatgtagtcgtcaggatcgcggccggcaagctcgaacacctcgcgatacagcgcgggcatcatcacgatggtgggacccacgtcgaaggtgaacccgtcgccgacgatgcggctcatcttgccgcctacctgcggctccttctcgtacagcgccacgtcgtacccggcatgccgcaaccggacggccgccgccaacccggcggcgcccgcccccaccacgattacccgtttcatgcaactccttagccgcaaccgatatgctatccggttatggtatgggttgtcgcacgggagcagtccccgggcgcgccatcgtagggcaagccgtttcggctgcgtcaggcgtccgttgacgggccggaccattccagcggcccggcatccgccgacagaggtcccccctcccgcttgatcgcctccttagcggccgcggtgcttccgcttgcgcttggcggtgcgcagctcgaagacgcggcgggcctcggcctcgcggcgcgtgcgggcgtcggcgcggcgctcttccttacgctcctcgtaggcggcggcgagcgcctgctgggccttcgttcccacgccgtggcgtgcggcctccagcgtcttgcgcgcctcgcgctgggcgcgcttcggattgcggccgcccgcagccacggccgacgcggccgacgcaccggcctcctccccgccgtccgcgcacatcctgaagtcgagccggccccattggccgcacacgaaggcgagcacgtcctcgtcggccggctcggggccgaacacgaagcggcacgcgccgtagagcgcgccgtcgcgccgctcgcatatgcctatccagaattggccgtcgtgaagtatcgtcaacgtcgatgagatgctgacctgcatgattcctccttatgtcgttgtgaacgaacgaagaagggacaaccaggaggcaggttactggcagcagggagacgcgcgccggggcgctttgccaaccggccgcgcgctccggacggccgcgcgccgccctgccgcaccccgactacccgacggggtcgtgtttttatcttcgcacgcgcgagtatagcacggcccgcaacctccgtcccgaacctgctcgggcgccgcccaccaaccggcggatcgcccacggcgcgggcacggtgcagccgatcctcgccgatccgccgcaccgctcgacgcccaactgtggcatcatgagagccgacgaacgaaccgaggaggaccgcacccatgccgaacgacaaccccgccgagcgcccgcaccccaaagacccgctgcacggcgtgacgctggaagccatgctcacccgcctggtggacaagtacggctgggacgagctggcccgccgcatccgcatcaactgcttcgcgaaggatcccagcatcaagagctcgctcaagttcctccgcagaaccccgtgggcccgcaagaaggtggaggacctctacaagggcacgacgttctagccccccagcacgcaaaagcgcctcccccgcagcgggcgggagaggcgcttcgcgcaagcgagacggctgcagccctgccggctgccctacccgttcgccgggcggatatcctccagcggcatgggcacgtccggcatctcctcgggctcgcgcggcgcgccgacagcctcctcgtggcccggcagaatcacgttcatcaggatacccacgatcgaccccacggccaggcccgacagcgagatggtgatgccgcccatcggcagcacgatagcgcccgccgcgctgtaggcaatgcccagcgacagcaccaggatcaacgccgtgatcagcacgttgcggctcttcatgaagtccacgtggttctcaaccaggttgcggatgcccacggccgatatcatgccgtacagcacgagcgacacgccgcccaccacgcacgccggcatggccgccacgagcgccgcgaacttcggcgagaacgagaacacgatggcgaagagggccgcaatgcggatcacgcgcgggtcgaacaccttcgtcagcgccaaaacgccggtgttctcgccgtacgtggtgttcgccggtgcgccgaacagcgatgcgatgatggtggccaggccgtcgcccaagagcgtgcggtgcagccccggctcggcgatgtagttgcggttgcaggtggagctgatggccgacatgtcgccgatgtgctcgatcatcgtggcgaacgcgagcggcatgatggtgatgatggccgtgatggcgagccccgcgtcgaacgtttcaccgaacagcgagaacaccgtgttgtcccacgccaccggaagcccgacccacggggccgccgccacggtggagaagtccacctcgcccgcaaacgccgccacggcatacgacacgatcacgcccagcaggatggggacgatcttcaccatgcccttgccccagatgttgcacaccacgatgaccgcgatggccaccacggcaatgagccagttcgacgaggcgttcgtgatggccgaggaagccaggatgagcccgatgcagatgacgataggccccgtgaccaccggcgggaagaaccgcatgacccggtcgggcccgaacacgcggaacagcgccgacagcaccaggtacagaaggcccgcacacgcgacgcccaggcacgcgtagggcaaaaggttcgcctcgccgttcggcgcgatggccgcatagccggcgatgaacgcgaacgaggaacctaggaacgccggcaccttccccttcgccaggaaatggaacagcagcgtgcccaagcccgcgaacaggagcgtcgccgacacggaaagccccgtgagcgccggcacgagcaccgtggccccgaacatggcgaacatatgctgcaggccgaacacgcccatcttcggcaccccgagcgggcgcgcgtcatacaccgcgtccgggctgtccttggctcccatggtcggtaccggtcgatccttgctcatcggcaaaacccctctcgtatcgctcccctgcgcgcggcgccgcctcccggccgcgggcgcgcgcaaaccttcgatattatgctacaagaaaggcccgtcggatgcggcaacgggggaaagcgtcctgctttcccgtcggaaggcgcacgcggcgcgcggcgtctggccggcggcacgacacgcggagtttggccgggctgtgcggcgcacggcgcccagccgggcagcaagccgctccttttccggcgtcgggaaccgtcgcgcacgcccgccgtcgcgcctgtcccctctcagcggctcgccttcaccgttttcacgatggagtcgacggcgtcgatggcgagcgcgagcacgatgaagccgcagaacgcggtctgcgcgttcgacaccgcccagagcacaggcccgttcggcgcagcgcccgacgcctgcatcgcctggaggatcgcctggctgtcgaccagctggaaattcgtcagccagaagacggcgagcgccgcgaccacgaggtcgctcgcgagcgtgacaaccagcaggcgcggtgtgtagcggccctccaccagcttgaagctctcggccccgatgcacacgaccgtccaggcgatgatgacccatgccgacgagcggatggcctcggtgttgaaggggtcgaacggcacgccgtctccgcgatggctgagcgcgttcagcacgtcggggaacagcaggaacacgatggcgcccacgatggaaaacacgatcccagccaccgcgtcgccgcgcgccgggttcttcgactcgcgcggcacgggcggcagatcgtcgagcgagcccatcacctccacgtcgacgccgcgacgcgagaagaaggcgaacagcaaggtgacgaacgcgaaggcgaagacgagcgccgcgatcagcgagccgaccgcttcgagcacgcttccgagcacgccgccctccgcgcccgtcgccagcgacagcgcgccggccacgagcatgccgccggccacgcaggccagcacgatcttcagcacgtagaggtactgcgcgtagtacggctggccgatgaggcacgcgtcctcgtcggcggtgtacttgcgcaccacctcgccgggggttcccagctcggtgagcacgacgcgcacgtccttcgccgtgggcggcaggttcccgcagcgctcgtcgagcatgtcggagatgagcgtgcgcagctcctcggccacgtcggcgcgctgcttggcgggcagccggcgcgtgatggcgtacaagtagcgctcgatcaggtcgttatcgttcaacatggtcccgttcctctccttcggccagagcggccgcgtctccctcgcgctctccggcttccaacagcttgtccaccccgccgcagagcgcgcgccactgggcttcgacctcgcgcagcacgcgcaggccttcgtcagtggttcggtagtacttgcgcggcttcgagccgccgttgtcccattcgctttgcagcagcccctgcgactcgagccgccgcatgagcgggtaaagcgtgttcgcctcgatgggaatgccgtggtcggccagcgatttcaccagcgcatagccgtaggccggctcacgcagctggccaagcaccaacatgaccagcgtgccgcggcgcagctccagcaccatgctcgacaccacgtcgtcgtgtcccatgccccctcctctcgcttactgtgtgttgcacactataacatatattgcacagtagtgtgtggcgcacagtaaaaggaactgcagccgagggatttcgggcgccccgggcgcctgcgagcagcttaggggcgccctgcacgcaacttcggagcatctgcggacgcccgcggacgatttggggcaccctgcggacaacttcagggcaccctgcgggcagcttaggggcgcctgtcgcgttttatcggcccaactgccaaaaacgagccggtttggcaatcacgatgggttttcaggccctttgcgcgcaatcgcgaagatggccctcgcgatcacaggtcatggtttctccagatcgcagccccgcatcgcttcccagcctgccaatcggcgctctcggccgattgccaaaacggctcgtttttgacagttaaggccgttttgccgtacagaccgcatgcccacgccttcggctatactcggaggcgatggaattcgcgaacaagcgacaggaggcagccatgccccgcatgacggacgaggagttcgaggccgcggtcgaagaggccctggagagcattcccgagcggttcctcgaggcgctggagaacgtggcggtggtggtggaggacgagcccgacgactaccatttcgatatccttgacgagcccgaatgccggggcgcgtcgatacgcggcgacgagctactgggcctgtacgacggcgtgtccctccccggccgcgccgacggctacgacggcgacctgcccgacgtgatcaccgtgttcaagggaccgcatgagcgctgcttcggctcgcgcgcggaactggtggcggagatcggcaagacggtggtgcacgagataggccactacttcggcatcgacgacgcgcgcctgcgcgagatgggctattaggcgtttccggaaaagaacgcgcgacctgcatggacgcgcgcgccgtttcacgtataatctccccagaacatcaccgagaacgaggaggatgccgcatggatcccaacaagcgccccgaggacatggagcgaatcaccacgcctgagctggcgaacgcgttcatcgacgagcaagtggaggccatccgcgcccagatcggcgaccagaaggcgctgctggcgctgtccggcggcgtggactcgtccgtggtggcggcgctcttgatcaaggccatcggcaagcagctcatctgcgtgcacgtgaaccacggcctcatgcgcaagggcgagagcgagcaggtggtggacgtgttccagaaccagctcgacgcgaacctcgtgtacgtcgatgccacggaccgcttcctcgcgctgctcgacggcgtggcagagcccgaggcgaagcgcaagatcatcggtgccgagttcatccgcgtgttcgaggaggaggcccgcaaggtgggcgacgaggtgagcttcctcgcgcagggcaccatctaccccgacatcctggagtccgacggcgtgaaggcgcaccacaacgtgggcggcctgcccgacgatctgcagttcgagctgtgcgagcccgtgaagctgctgtacaaggacgaggtgcgcgtcatcggccgcgagctggggctccccgagggcatggtcgagcgccagccgttcccgggcccgggcctgggcgtgcgctgcctcggcgccatcacgcgcgaccgcttggaggcgctgcgcgaggccgacgccatcctgcgcgacgagttcgccgcggccggcctcgagggcaaggtgtggcagtacttcgtgagcgtccccgacttccgcgccaccggcgtccgcgacggcgtgcgcgcgttcgagtggcccgccatcatccgcgcggtgaacacggtggatgccatgaccgccgaggtccccgagctggattgggcgctgctcaagaagatcaccgcgaggatcctcgccgaagtccccggcatctgccgcgtggtctacgacctcacgccgaagccgatcgggacgattgagtgggaatagaagaatcgctgaaaggagttgtcatgaacaaggagacgttcgattacgtggccgagcgcgtggacgcgctcgaggattccgaattcagcacgcaggtgacgaaggatgctgcacaggcatggagggatgcggtagcagccgattcgagcgacgctgctatcgacacggcaacgaacgacctgctcgacgtcctcgaagggcgcccgacgacgatcgacggcgtgatagccttcctgcaagggccggcaatcgagatgcttggcgaagacgcggctgcaagcgcgcttgcagcccaacagcaacgcaaggaggcgggtgcgaagtactgcgattgcgaggcatgctccgcagccacggagatcctcgcgaagttcgaccgcatagagctctgatagcgagatatcggagcctcccaccgagtccgataaacgatcacgagccatcgatgcgaaaaacgggggctgcgtaccttgcgacgcgcagcccccgctgtacaggcttgctatacccgctttcgaactacgcaactcccgctgtcgctcgccatccgtgcgagcagcttcctgcgcacgggagagcatccggagcggcattagaagacggcggtcaagaacgcggcggccgcgagaaagattcccggcacgttggccaccacgatcggccagtcccgctccttcttgaagaggccgtagatggtccagaacaggcagttgaagaacgctgccaggggctgcacaggattgccggggtgcccggccaggttgtccatgatctgcggaatgtaggagacgtacatacacaccgacagcaccgaggctatgcgccccactatagcgatgggcctcgcatggcgcttgtcgcctccctggtgcaccgatgccttctgcaccatgcgtctatgcgtaccggccttcacgttcatcgagcaccctcgtgttcgcggatgggaatctctgcaactcgatgatagatcgaggcattcgaggcccccgcgggcgcgatgaaccgtgacgcaaaggcgagcagggggtaagcgcgccgtttaccgcgctaaaagccgcagagccagtccgctgcccttgcggcatctaccgaaacgccatccgacaagccaacgttgcgcttttgccagaccgcaaagtgcgcgttcacgcgcgacgccgaagggagctacgggtcggcgacggtcgaccttgccgcccctcgacataggttcagctgatccccccatcggaagactttcctaccatctccctccgcacgaagcaatccgccacgtggtcgttcaccatgccgatggactgcatataggcatacacgatggtggagccgacgaatttgaagccgcgcttcttgaggtccttgctgatacggtcggacagcggcgtggtggccggcacatccgcttgggtcttccaatggttcacgataggctcgccgtccacgtacccccagatgaacgcgtcgaagctgccgaactctcgagccacatccaagaacagccccgcattggccacggccgcctcgatcttgcggcggttgcgaacgatccctgcgttcgccatgagctcctcgaccttcgcctcgtcgtagcgcgccactttggcgggatcgaagccgtcgaaggcctcgcggtacgcctcccgcttcttgaggatcgtaagccacgacaggcccgcctgcgcgccctccagaaccagcagctcgaacagctcgcggtcgtcatgggtgggtcttccccactcgttgtcatggtagtcaacgtagatcggcgtgtcgcccgcccacgagcacctagtccgctcctccactgagcctcctagcgaaacgtcatccggtacgcaagcgtcgcacgctcgcccggcgcgagcacgcgcacgccgggcttctcggcgagctcgcgcggggagaaaagcgcgtcgggcagcgccgaccacggttccaggcacaggtagcgggcatcggcctgacccgccttcgtccatatgcccaggtaggggaagtccgggaactccacctccacctcatgcggattcgcggcgctggcgagcacgaccctgccgccgggcacgttctccagcacgacggtgtcgatgcccagctgctcgggggtcttcgtcaggcgcccgtcctcgagcggcacctcgatcttcggcagtgcgaggataccctcctcgtccatgtcgaacatcccgagcgcgtcggccccctcgaaacgcacgtagtagtcggccatgcgctcgcccggcagcaggcgcgtctcgtacgcctcgtggccgcccagctcgaacggcatcggaacctcgcccgcgttctccacggtgtgcgtcttcacgatggttgcaccctcgagcgagaaatccacgcgcaggaggaagtcgaagggaaagaccgcccgcgtcccctcgtcggaggttgtctcgaagcgcgcatgcgtgcccgacacctgctcggccgcgaacgcgcggtcgcggcagaatccgtgcatgggagcgtccacgcgctcgccgccgttcgcgtaccagccgtcgcgcaagcgcccgatcagcgggaacaggagcggcgcccgacggccccataccgcagggtcgcccgaccacatccgctcgatcccctcgcacacgacgctctgcagctccgcgcccttgctcgatatgcgcaccgcaagcgcatcgttctccaagaccatagccgtcgcttccatcgcaggccgcctttcgcttcgattgcgtgtccagaacatgctagcgcatacgcatgcatcctgcagatccgtcggcacattgaagtctgcggatcctgcaaccgcccctggtatccacctcttcaccgaagtccctatttctgctcattttgcaacctacccgttatctgacggtataatggacgcgaaaagaccgaacaccgcacccaaccgcatagaattcgctcgcgctccgtccgggcctccaacctggacggagcgctttttcgcgcgcgccggacggaccgacaccaagaagagcagggcatgcaacgcgacaagatcaaaccgatacttttcagcatcatcaagcactccagcaaagaagagctcaagcggcagctgcccaaggacgttctctcgggcgtcatggtggccgtggtggcgctgcccctctccatcgcgctcgccatcgcctcgggcgtgaaccccgaacaggggctctacacggccatcgtcgccgggttcctcatcgccttcctcggcggcagccgcgtgcagatctcggggcccacggcggcgttcgccaccatcgtggcgggcatcgtggcaaccgatggcatcgacggcctggccgcggccaccgtcatcgccggcgtgctgctcgtgctgatgggcttcttcaagctgggatccctcatccgcttcgtcccctacaccatcaccacgggcttcacggcgggcatcgccgtgacccttgtcatcgggcaggtcaaggacttcgccggcctggcattccccaccggcacccccaccgtcgagaccatggacaagctgcaagccgtcgcccagaatatcggcacggcgaactggcaggccctcgccgtgggcgcggtgtgccttgccatcctcttcctctggcccaaggtgagcgagaggatccccggatccctggtggcgctcatcgtgggaatcggcatggtaagctgccttgggatgcaggcgagcaccatcggcgacctgtacaccatcggcagcagcctgcccacgctccacgttccccagctaagcgtggagctgctaagcgaccagctgccgaacggcatcaccatcgccatcctggcggccatcgagtcgctcctgtcctgcgtcgtggccgacagcatgatcagctcgcaccaccgcagcaacatggagctggtggcgcagggcgtgggcaacatcggctcggcgcttttcggcggcatcccggccaccggcgccatcgcgcgcaccgcggcaaacgtcaagaacggcgggcgcacgcccgttgccggcatgacccacgcgctggtgctgctcgtggtcctggtgttcttcatgccctacgccgccctcatccccatgcccaccatcgcggccatcctgctgcacgtggcctacaacatgtccggctggcgcaacttcgtgcacctatgcaaaacggcctcgcgcggcgccgttgccacgctgctgctcaccttcgggctgaccatcgtgttcgacctggtggtggccataggcgtgggcatgctgatcacggtcgtcctgttcatgaagacggtgagcgaggagaccgaggtgcgcggctggaaatattactgcgacgaggactccgaggtcacgcacctgcgcgagctgcccgcaagcgtgcgcgtgtacgagatcaacggccccatgttcttcggcatgtcggaccgcatctccgacatctcggtgaaggagttcacgaagtacctgatcattcgcatgcgcggcgtgccttcgctcgactcgacgggcatgaacgcgctcgagaacctctacgagtactgtcgcgagaacggcgtcagcctcatcttctcgcacgcgaacgagcagccgatgaagaccatgcgccgcgcaggcttcgtgggccttgtgggcgaggatcacttccgcagcaacatcgacgacgccatagcgtacgcgcgccagctgctcgacgaggaagggagggcaaaaggaaaagccagggcctcgctgccgtagcttctcccctaacgcgcatccagatttcggcaattccagatgacgaggcgggccgccatcaagaggagcggactcgctggcaagatcgccaacgggcagcatcaaggcgaacgaaatcctcatcgaaaccttcgaggggacgatgcgcgtgctaccatgtattcataatctagccaatcatgataacgtgatcgatctcaaacgcggaagcgcgtgcctccgcacctgaacgcgcgcgtagaggggacaatgctatgaagcagaacgcgaacgcatcggtctggctgccgagggcaatcgccgttatcctagccgctctgatgacgctgttcttcgcgatcgccataaacaacacgatgaccctcggcgccgaaacggaccggacaaagaacggcccctaccccgtgtccgtggcagcagggcgcgtggaaacgctgctcgtgcagtgccggacccttgcagaccggccgctgttcacgcgcacggacagcgccatcaacgacatcgagcgctcctacgccgtagctgacgccgatttgcgcgagaagctgtcctttatggcaacggcacacgagtccgaccccgaagccgcccgcaagcttgagcagggctatgaatcgctcgacgtcgcgcaacgggaatacgtcgccttgtgccgcaacgccgatgtaactgacgaggagatcgaggcctatgtggacgggatcatcgaccccgccgtcgaagagcttctgcgcatagacgccggcatcttggacgagtcgaccgagtcggtggagcagctctatagcatcgtgaaagaaagggggcggcagacggtaggctgggcggtggtgctcatggcaggagtaaccgtgtcgctggcggtgtacctcacgctcatgtaccgcaaccgcatgcgggaaggccgcctcaaggccgacctgcaggaggcgctcgccctcgcgcagtccgccagcgcggcgaaatcgcagttcctctccaacatgtcccacgacatccgcacccctatgaacgccatcgtcggactcaccgccatcgccaaaacccacctgcacgaacctgaccgcatagccgcctgcctcgaccgcatccagtcctcctcacagcaccttctgagcctgataaacgacgtgctcgatatgggcaagatcgaaagcggcaagatcgtgctgaacgaggaccgcttcagctttcccgaattcgtcaacggcgttatcgccatcgtccagccccaggcccgcgcgaagaacctgtcgctcgacatcaccgtgggcaccatccagcaggaaaccgtgatcggcgactccatgaggatgaaccaggcgctcatcaaccttgtcagcaacgccttgaaatacacgcccgacggcggatcggtgcgcctttccctaagcgaggggccgtcccgccgccccggctgtcgtgactaccgcttcgtggtgcaggacacgggcctgggcatgtcaccggagttcatcgagcgcctgttcgaccccttcgagcgggaggaaagcgacatgacggagcggatcgagggcaccggcctgggcatggccatcacgaagaacgtcgtggatatgatgggcggctccatcgaggtggagagcgctttgggcaagggatcgaccttcaccatgacggtccccctcgccccgatcgacgaggaggaggacttctcgctcgcagggctggagtctgcacgcgtcctcctggtagacgacgaccgggatgtggtcgaaggaacgctgctcatcctagacgagctcggcctttgcggcgacgcagcctcttcgggcctcgacgccgtgccgctggttgcacgtgcccatcgcgaggggagggactaccgcttcatcatcgtcgactgggtcatgccgggcatggacggcatcgagaccatccggcgcatccgctcggaagtgggagactccacgcccatcgtattgctgacagcctacgattggcacgagatagaagatgacgcacgcgccgcaggcgtgtcggcttttgtatcgaaacccctgttcaaatcgcgcttacatcgcgttctgaagcatttctcccacccggacgacccggccgaggactcctgcgagccagccgaggcgcatgttgagggacgcgtgctgctcgtagaggacaaccagctgaacctcgagatagcctcggagcttattcggcgcatcggcgccgaagtccaccaggcgagcgacgggcagaaggccgtagatgccatggcgaacgctcccgaagggtattacgacctcgtgttcatggacgtgcagatgcccgtcatgggcggcatcgaggcaacccgcgccatacgcgagcaggagcgcgaggtcgggcgaaagcccgttcccatcgtggccatgacggccaacgccttcaacgaggaccgagagcgtgccctcgcagccggcatgaacggcttcatgaccaagcccatcgacacggcgaagctcaggaggatcctcgaggaatacctggcaaatcccctataggcagacgcagggcgacgagaaacggggtcagggagggggggggggtgcgcgacggcgccaatacgcacgacgccccctgctgcgcgccgctcccctacatggcgccttctgcgatctcgccggtgcgatacgcctccagcaatcgttcaagctccgcgatctgccgtttgagctcggctccgttgtcggtgtcggccacgagcgtgcgcttgtccggctgctccaccacgctgcgcgacgagtggatgtccagctcgttcaccacggcggcgcgcgccgacgagagcggctcatgggcggccagcacgaagccgtacgagttcgagatgagcgtgtagccggcgatgcccgtggtgggctggtaggctttcgagaagccgccgtcgatggtgagcaccttgcccccgcacttcaccggatcctcgccgtccttcaccttcacgggaatatggccgcacacgatgcgcgaggtctcggggtccatcccgaagtcctcgaagacgccggccatcacgcgctcgtcgtcaaggtaggtgtagaacgggttcttgacctccttgcgcgcctccttctcggctatgagatacagctcgaacgtggccatcttgctcttcgcgaacaggggcgacccctcgcccagccacatataccacagcaggtcgcggccgcgcttgcgcatctcggggtcggggtcgtagaacgccgcgcgcacgtagcgctccatgacgtcgtagagcgcgcgccccttgtacttccggccgaacacgtccgtctccctaagcgagccgtcggcgttcagcggcacgcaggcgtggaacagcaggctgccgttgtacaccttgtagaggctgccggcctccaggaagaaacgcatgtggcgctgcagcttctcgcagcccgtgaacgcctgctccaagcgctgcatgacctcttcctcctcgggcgtgaggcggtaggggtcgtccgggttcaccgtggggaacaccgtgtcggtgagcgcgtactccacgccgtccagcatgaccgtgccacgctcgtggtcgatcttgtccaagagcttgcggtctgcaaggccgaatccgggattctcgtcgatgagctgcgcctccaccttgaactggatgatggccatggccttctggatcttcacgttcatctccagctcctgcggcggcaggtccgggttgcccttgaggccgaacgcgacgcacgggtcgtcggcgtaggcgctcgtcgcgaacgccgcgagcggcaggatgttgatgccgtaggcgtcctccagtatggacaggttgccgtagcgcgcgcagttgcgcaccacgtgcgcgatgcagccgcgctggccgagcgcggcgcccatccacacgatgtcgtggttgccccattggatgtcgagcgagtggtagcccatgagcgtgtccatgatgacgtcggggtacggcccgcgatcgtagatgtcgccgatgatgtgcagatggtcgatggccagacgctggatgagcaggcacagcgcctcgatgagcgcgcccacgcggtcggtgcggatgacggcgtcgatgatggccgcgtagtaggccttcttgtcggcgccctggctgttctcggtcatcagctcctcgatgatgtacgcgaaatcgcgcggcagcgccttgcgcacgcgggagcgcgtgtacttctgcgcggcgcgcttgcacacggccacgaggcgcggcagcacggtctcgtaccatgcctgcgggtcgtccacttgggacagcaccagctccatcttctcgcgcgggtagtagatgagcgtggccagcgagcgcttctcggccgcgctcagcgtgtcgccgaacacgtcgtcgatcttgagcctgatggagcccgagccgttgcgcaggatatgcgagaacgcctcgtactcgccgtgaatgtccgaggcgaagaactcggtgcccttcggcaggttcaagatggcgctcaggttgatgatctccgccgaagccttggcggcggtggggaacgaccgcgagagaagttccaggtaccgcttttccatcgcatccatgtagggcctccttgtgggtgttgccgcgcttgcacggccctatggtacccgcatcaggcccacaccgggcgaagcgacaccgaaacggcgcgattattcgacggaagcgctgaagtccgactcccggacggcacccggacaacgtaacgaagatcacgcgagcgacgcgcacggcgtgtcgccgccgtgctactgctccggcgggctactcccaccctttccacacgtcgggcgcgtagcccaccgtggcctgcttgccgttgcgcacgatgggctcggccagcacgtgctggttctccagcagcttgtcgaacttctggtcgggcgcgaggtacgcgagcagcgccaccgtgtcctggtccttcgccttggggtcgacgagcgcgtcgatgccgcccaccgcgcggcgcaccgactccagctcgcccttgctcatccccttctccgccaggtcgatgaactggagcttcacccgccgatccttgaagtagcgctgcgccttcttcgtgtcgaagctcttcttggtgccgaacacctggatgttcatcgccttcgccttcccgctcgaccgcgcttatactgtttctcgaaacactccacctaagattttaagtcacgaagggaagccgcgcatggaactcgtcgaaatccccgaagccgacaaagagaggcacctcgacctgctgctcatcgccgacgagtcggcggacatgatcgagcggtacctgcaccgcggcgatctgctggccctcatcgaggacgatgaggcgcgggcgctctgcgtggtgacgcaggaagagcccgacgtgttcgagatcaagaacatcgtcaccgtgcccgagcaccggcgcaagggctacgggcggcggctcatcgcgcttgtcgccgagcgttaccggaaccgagggggctggctcctcgtcggcacgggcgacgtgcccggcatcctgcgcttctacgagcggtgcgggttcgagcgctcgcatgtcgtggagaacttcttcgtcgacaactacgaccatcccatgtacgaggacggccacaagctcatggacatggtgtatttgaggatgcgcctctagcgcaccggatcgtagttcaactcggcgggaatgtcggtggcctcgagcttcatgatgacggggcgcaggccgtcgttgcagctgacgatggcgcatccgggcacgcgcatccagtcgtcgaagtagaacgtgaagtcgccgccgccatgggcaagcgcgaacacgtactggtagacggccttccacgcctcgtcgcagaagtccttgggcttggcgtagtcggcgaggaagacctgcccggccttcatcatggggcacggcgcgagcccctcggcgccgtactcggcagccagctcctcgtcgaacgtggccttcaaaacggtgatcctcaccttggtcatggacatggcgcatcctttcgcgaacatcgtcctttctttgccgcctctcgttatactgtatgggacgaccgcaaaggaagtacggtcttttagaacaggtactatcccgaaaggaagcgctatgagcatggagccctacgagggaagcctctcgtcgctcgccgacacgccgttcggctacacgctgtcgatgatcggcgggaagtggcggctcgtaatcatgtactggctcgtggaatgcgagaccatgcgcttcaacgagctcaagcgcaagatcggccgcatcaccgacaagacgctcagcagccagctcaaggccatggaagccgacgggcttgtcgtgcgcaccgagtacccccagatcccgccgaaggtggaataccgcctctccgagaagggcaagtcgctctaccccctgatggaggccatgtgcgaatggggacgcgagcacggcactttctattagggtggctactgcggtcgctccgcttgctcggcatgacaacatgtcgatcttgccttagcgccgatacgggcttctagtcacagttttggccgctctgaagccttttcgtgcgcgcagagttcggtttcgacggccggacggctgtcctctgcgtgtttgcgcaggtcgcgaattgcgccgaagcacctgctaaccgccgaaaagcttcagagcggccaaaactgtgaccagaagcccgcgattctgcgaaggaccccaacacggggtgccagacagcgcagccaagctcgtccaatcccacgcagaggtagcggggagagtcgcgctataatgcaaggccgacgaatcagccgctcgagacctcaggagttcgctccatgcccaccatccaaaccacgctcgcgtgcgagctcaacctgaccgcggcgcaggtcgcggccgttatcgccctggtcgacgagggcaacaccatcccattcatcgcccgctaccgcaaggaggccacgggcggcatggacgacgcccaactgcgcgcgttcgacgagcgcctagcctatctgcgcaacctcgaggcccgcaaggacgaggtgctgcgcgccatcgacgagcagggcaagctcacacccgaactgcgcgcgaagatcgagaacgccgcggtcatgcagcgcgtggaggacctgtacaagccatacaagaagaaacgcgccacccgggcgtcgaaggcgcgcgatgcggggctggagccccttgcgctgctcatcctggcgcagggccgctccgacaaaacgccgctcgacctcgcggccgggctcgtgaacgccgaggccggcttccccacgcccgaggcggcgctgcagggcgcccaggacatcgtggccgaggtcatcgccgacgacgccgagcacatcgaggccctgcgcagcttcaccaagcgcaccggcgcgctggccgtggaagcggtcgacccgcaagagaagaccgtctacgaggcgtactacgacttctcggagccgctctcgcgcatccccaaccaccgcgtgctcgccgtgaaccgcggcgagaaggagggcaagctgcgcgcgaaggtgcgcgtggacgcagacgccgccatcgaacaactcgagcgccgcgtggtcaggaacccggcaagccccttcgcccccgtgctgcgcgaggccgcggccgacggctacaagcgcctcatggcccccgcgctcgaccgcgagatgcgcagcctcctcaccgagcgcgcgcagaccgacgccatcaaggtgttcgccaagaacaccgagagcctgctttcgcagcgccccgtgcgcggcgcgcgcgtcatcgccatcgacccgggctaccgcaccggctgcaaggtggcggtgctcgacgagtacggcaagctgctcgacttcaccaccgtctaccccaccccgccgcgcagcgaggtgcgcaagacgcaggacaagctggccgggttcgtgaagcgccaccgcgccaacaccatcgtcatcggcaacggcacgggcagcagcgagacggaggaggtggtggccgacctcatcgccaagtcggacgcgcccctgcgctacaccatcgtgaacgaggccggcgcgtcggtgtactcggcctcccagctggccagcgaggagtaccccgacctcgacgtcaccacgcgcggcgccatgagcctgggccgccgccttcaggacccgctcgccgagctggtgaagataccgccgcagtccatcggcgtgggtcagtaccagcacgacctcaaccaggcggaactcggccgcgcactcgcgggcgtggtggagcgcgtcgtgaaccgcgtgggcgtcgacctcaacacggccagcgcgagcctgctgggctacgtgtcgggcgtgagcgccgccgtggcgaagaacatcgtggcctaccgcgaggagcacgggcgcatctccgaccggcgggagctcaagaaagtaccgaagctcggcgccaaggcctaccagaactgcgccggcttcctgcgcgtgaccggcggcgcgaacccgctcgatgccacgagcgtccatcccgagagctatcccgtggcgcgcgagctgctgaagcgcgcgaaggtgaggccggaagcgctcgcgcgcggcggcgtccccgacatcgcaggtcgcctcggcgacctgcccgccctcgcggccgagctgggagtgggcctgcccaccctgcgcgacatcgtggccgagctggagaagccggggcgcgacccccgcgacggcgcgccggaggtggtgttcagcaagggcatccgctccttcgacgacctcgtgcccggcatggagctcaccggcaccgtgcgcaacgtggtggacttcggcgcgttcgtggacgtgggcgtcaagcaggacgggctcgtgcacgtctccaagctggccgaccgcttcgtcaagcacccgagcgaggtcgtggccgtgggcgacactgtcaccgtctgggtcaccgccatcgacaaggaccgcggcaagatctcgctctccatggtgaagggaaaggcgtaagggggcggtagccgcccgtcccccgtcataggtagtcatagggcatgcggcgggcgaaggcgtagaacaggagcagtgccatggcaacgagcggcgggagcgctacggcggcagccagcgtcagcacccgcgccacgtagaaggcgagccgctgccagcctgcgcgggggcgcgtctcgcacgtcatgcgcacgaagccgcctccgagcgtgcggccctgccgaagccacgggacaacgccctcgaacacgacgaacaccgcaattgcggccgctcgctcccaccagccgccgtcggtccacgaggagtcccccgccgcatgcagcacgacgctcgcggcggcgagcaggacgacaaggacggcccccatgacggtcaggtcgatccagtacgcgacagcgcgacgcacgaagccgggccggtcagtcacgcgtccctcccgggccgactcgctcggcggcagcaggcgcccggcgagcacggtgccggaccacccgaaagcagcgcccatcgtgttgcagaacaggtccagcacgtcgaacatccggtacgcatagggatacaggccgaacaagccggtgagctgcgccgtctcaatcagcagagaggcgccgaagcccaaggcgagcgtcggtgcgaaccgccagcgcagcaggcgccctgcgatgaagccgagcgggacgaagaacgccacgttcgccaccatgtccggcaaggcgcggacgccgtctttcgcgaggtcgtccaagaagccgagcggattgaaccgcggctcgatgccgtaggtgatgccggggccggaagcgccgtcgggcagcggatagagcgtgaagcacccgagtcccagcacgtagagcacggcgaggtaggccgataccgccgaagccgcgcgcaatcgcccgtcccgatggtacaggtaggcgaggatgggcagcgtgagcaccatcgatgcgagcggccaaagcgccaccgccgccgcgaagctctcgctgaatcgtccgaggaactgcgcaaggtatcccatctcctcctcctttccccgttgtcccgcgcgcgggttccagtatggtgcagcctccttgcgtcggccttgcctgtcgcttacggcgcgcttacttctttgtaaggcgcaggtggagaagagcaggcatctcgcgacgaaacgggccgagcgctacaatagcggaatggatacttctcgaaacatccaaccgcccgctccgtatgcgcccgaccacatccaggtgcgcggcgcccgcgtgcacaacctgaagaacctcgacgtggacatcccgctgaaccagctcgtgggcatcgcgggcgtgtcgggctcgggaaagtcgtcgctcgcgctcggggtgctgtacgcggagggctcgcggcgctacctcgaggctctctccacctacacgcgccgccgtctcacgcaggcagggcgcgccgacgtggacgaggtgctgcacgtgcccgccgccctcgcgctgcaccagcgacccgccgtgcccggggtgcgcagcacgttcggcacctccaccgagctcttgaacagcctccgactcctgttctcgcgcgtgggcagccatgtgtgtcccaacggccaccgcgtgccgcccacgctgaacgtggctgccgagcgccccatcacgtgccccgtctgcggcgtggagttcttcggcccgagcgccgaggctctggccttcaacggcgacggcgcctgtcccgaatgcgacggcaccggcatcgtgcgcaccgtggacgaaagctcccttgtgcccgacgagtcgctcaccatcgacgagggcgcggtggcgtcgtggggcacgctcatgtgggacctcatgaagcaggttgcgcgcgagatgggcgtgcgcaccgacgtgccgttcaaccagctcacgcccaaggagcgcgacatcgtgttccacggccccgccgagaagaagcacatcctgtataaggcgaagaagtccgacaccttcgccgagctcgacttcacctactacaacgccgtctacaccgtggagaacgcgctggcgaaggtgaaggacgagaagggcctggcgcgcgtggcgcggttcctcaagcagggcacctgccccgtgtgccacggcacgcgcctgtctgccgacgcgctgaagccgcaggtggcgggcgtcaacctggccgaggccaccgagaagacgctcgacggcctcaccggttgggtggacgccgtgccgggcgggctcgcccccgagatgcgcccgatggcgcgaaacatctgcgagtcgttccagcacacggcgcgccgtctcgtggacctggggctggggtacctctcgctcgaccgcgcgggctcgacgctctccaccggcgagcggcagcgcgtgcagctggcccgcgccgtgcgcaaccgcaccaccggcgtgctctacgtgctggacgagccgtccatcggcctgcaccccctgaacgtcgacggcctggtggaggtcatgcgcgaccttctggccgacggcaactcggtggccatggtggaccacgacgcgcgcatcctgcgcgcggccgaccatatcgtggagataggccctggagcgggcgccgcgggcgggcgcgtgatcgcgcagggctccgtggccgagatcgaggccgaccccgcctcgctcatcgggccgttcctgtcgggtgcgcgcaccgtctgcgtgcgcgaccgggcagatgcggacaacgtgttcgccctcggccgcatccatctggagacggacgcgctccacacggtcaagccgcttgccgtggacgttccccgcggccggctcaccgccgtcaccggcgtgtcgggctcgggcaagaccacgctcgtgctggagagcctcgtgcctgcgctgaaggcgtgggccgccggcgagaggccgcccgcccacgtgcgcgccctcgaggctgcgggcatcgagcgggcgaacctcatcgacgcctcccccatcggcatcaacgtgcgctcgaccgtggccacctacgcgggcgtgcacgacgaactgcgccgcgccttcgcccgcacgccggacgcgaaggcggcggggctcaaggcgggcgacttctcgtacaacacgggaaagctgcgctgccccgtatgcgacggcacgggctccatcagcctagacgtgcagttcctgcccgacgtggacatcacctgccccgcctgccgcggctcgcgctacgcccccgatgccgatcgcatccgccgcccgcacgccgacgacccggtggacctcgtgtcactgcccgacctcatggccatgagcgcgagcgaggcgctggccgccacctccgacctcagaaaggtggccgctaagctgcaaaccctctgcgacctggggctggggtacctcaccctcggcgaggccacgccggcgctttccggcggcgaggcgcagcgcctgaagctggccagcgagatgaagcgcacgcaggacgatgccgtgttcgtgttcgacgagcccaccatcggcttgcacccgctcgacgtggcgcagctgctcgaggtgttcgaccgcctggtggtgcaaggcgccaccgtggtggtgatcgagcacgacctggacgtcatcgcaaacgccgactacgtgatcgacctcggtcccggcggcggcgcgtccggcggccgcgtcgtcgccgccggcaggcccgagcaggtggccgccaacccggacagcgtcacgggaaggtacctgtagaggcgtggtagaatctaaaagtgcgaccttcgaacagcctcgaagacagggaaggcctccatgacagaacaggacttaagcgatctcgattacgccaccggctatgagaagatgtacggcgtcaccggcgagcgcgaagattatctgcgccttcttcaatatcaacttcatcgcttcgacaatcaccccgcagctccgaacagcgacaaagcccttatcgagcgtcttggggaccagagaacgatcctcgccgagcacggtttcgaccccacgaaggaagaccatatcttcgagaccgtcaaggttgacttcgtacataccaccgcgcgcatcgagggcaacacgctctcgcttaaagagaccggattggtgctcgaggaagacgccgtcattcccggaaaacccttgagcgagcacctggaggtcgtcgacatcgcccgtgcgttcgacctcatggtcgagttcgtgcgcaacggcacaccggtttcagagaaagccgtcctcgccatccacgaagccgcgtcggcgcatttggacgactgcgagccgggggagtaccgctgggaccagcgctatatctcatcctcccctatcatcccaccgcctcccgcacgcgttccccagcttatgaaaggcctgatcgcctgggcggcgaaggccgagggccccgcgatcgagacggcggcgctcttccacctcgtcttcgaggacatccatcccttccaggacggcaacggtcgcacgggacgcgtgctgctcaatttcatgctgatgagcgccggctaccccgccgtgagcctcaaagcggacgaagcgggcatcgccgcgtactaccgggccatcgagtcgttcacgcgcgacatcgagggtcgcaacggctcagcgatggtcgacctcgtcgcccatcggctggaagactccgtcggccagcgcatgctgcaactggagcaggcgagaagctaacgcccctcccctccgagttccgcagacggatctcgctcctcggcgacgatctcccagatatcttcgaaggcgatgcgggtgcggacgatggtgacggtgcgcgccgcgaggtcgatgtcgctcaccaggccgtgcgtcgtgacgtacgcctcgccgtcgtagtggacgacgctcgccatcgtgcggcgctccatccgggcgaggcgctgcgacagctcgagcgcctgctcgtcggtcagctcgcgcttcggctccaccacgcgctcgcgttcgcggatgagatcgtagtagcctttgagcgcggcgaagggcatgaactgctgggcgcggtcggcgcgcggtcggcgctcaggcatggtggcccccgatctgctcgttgcgctcgcgcgccgtggccttctccttcaagctggtcccgcgcagaagcgcgttcttcccgaagcgccccttcacggccagcacggcctgctgcagccggagctcctcggcctccgcctccgcatccgagaacagatccatcgtggcgaattcctcggggagcaccccgccgacgcccacgttgatgcggcggatgggcgcgtctttgcgcgtggtctcgtcgaacaggtcgaggaagcgcggcatgagcttcgagtagaggttcgtgcgatccgcctgcctgcgcgtggagccggtgtgagggaaaccgcggcggccgcttgcggggcgcctgccgtggccgccgtcgaagaaagcgccgtccgcttcgcccgcaggctcgcctggacctttcgcgtaccccacgtacagcgatatcgatccggctacgaggcgcttctccacgaggtcgagcacgagctggtccaccatctccttgagcacgtcgcgcgcttcctcgaacgagtagtcgcagggcagcacctggccgttccccagggaatgaccgctcggctcgtaggcgtggatgtcggcgatggtgcacggttcaacgccatgggcatggtcgatgaggtactcggcgttcaccccgaactcgcggtagagcgtggcctcgctcatctcgcacacgccgtgcagatcgtacacggcgtacttcgccagcctcttcgcgatgccggggccgatgttccagatatcggtgatgggccggtgggtctggatcgagcgctcgaactcggcctgatcgaggtaaccgatatggtcctcggcgtgcttcgccgtgatgtcgagcgctaccttggcgaggaacaggttcggaccgatgcccgcggtggcgcagacgcccgtgtcggccagcaccgcgtccatgagcatgacggcgaactccttggcgcccatccggtacagcgcgaggtacggcgtcgcgtcgatgaagcactcgtcgatggagtacgcgtggacgtcctcgggcgacacgtagcgcaggtagatcgagtagatgtcggccgacacctccatgtagcgctgcatgcgcgggcgcgccatgacatagtccacgccctcgggaatctcgaacacgcggcagcggctcgacaggccgagcgccttcatcgacggcgtgatggccaggcagatggtcttctccgtgcggtcgggatcggccacgacgaggttcgccttcagcgggtcgagcccgcgatcgacgcactcgacgctggcgtagaagctcttcaagtcgatgcacacgtacgtgcgctccttcgccaccgccgccctcctccgaactctcgtttgatgaaacgtttgttcgtgaagtataccacagcccgcaagcggagagcgcagcccggcggcactcattcaaccgctaccggcgctcaggtgcgatcgggcgcttggccggcccttccagcaccgacccgtcggcagcgaagcgcgagccgtggcaaggacagtcccacgagccctccacgtcgttgcgctccaagcagcagcccaaatgcgagcagcgccgccccggcttcaccaggttcgctgccgacacgcccgcgttcgagaacaggctgggcgtgagcatggatcgctgcggcgagaacagggcctccaccgggctccgaccgcgcagcacgaggtcggcgatggcgcgcgcggccacgagcgcgcccgtcatgccccatttgctgaaccccgtggccacgtactggctcggtcggctgcgccgatgcacgccgatatagggcacgtggtccaggctcatgcaatcctgcgtcgcccacgcgtagcgctcctgcgcgcccgggtacgcctcggcggcgaacgcccgtatcttggcatagccctccgtgggcttcggcccctgccccgtgcggtgcccgcctcctcccaccagcaggtactcgccgtacgtgcggaacgagaaaccgcccgcgtcgcctatgaacatgccgtcaacaagcggggcgccttccagcgccaccgcgtaggagcgctcctgatgctccttcatgaaatacaatcccggcacgttgaccagcggatagtgcgtcgcaaacacgatatggtcggcggttatggagccgcggtccgtgcgcgccgtgttcccgctcacgtccgtcacgaacgcgtgctcgtacacgtcgacggacggcatgagcccgagcagcccgaacaacagcttcagcgggttgaactgcgcctgacgctccatgcccagagcgccccggttcgcaaccggcaccggcgcgctgggcagcacgtggtgcgggatgcccagctgctcgtaggcggcaagctcgcgctcgatgcccaccgtggagcccgtggcgtacacgtaggccgtcttctcctcgaagtcgcagggagcatcatcggccagctggcgcagccccgccaccgccgcctggttcgcttcgaagtagaggcgcgcggcatcggcgcccctcttcttgatcagccggtcgtacacgagatcgtgctgggctgttaccttcgcagtcgtgttcgccgtcacgccggcgcccacctggccgccctccaccagcgcacagcggcatcccgcctccgacagcaaatacgcgcagagcacgcccgccatgccgccgcctatcaccagcacgtcggcggaacggtcgccttcgagcgccttcgcgtagccctgcggccgcacggcgctcgcttcccagagagaggtcatgccgagccctttcgtcttcaagaggaacgatcaggcatcagggtacccccgcccgccactaggaaagcggcccgccagagcgcgtttgccgcgctttgccgaacggtttcgcacacgtgagcggaaacgccattcgcgcaccttggcctcacccgcgtcgcagcgcctccccaacacgcgtcatcttgggatcggcgagccgcgggcgctcgcggcaataccatgcgtaagcgctccgcatgccctcggcgagcgccacgctcggctgcgccaggccgaaccgcgtggcctttcccgtgtccagcaggtaggtctgatcccggaaggggaagaactcgcgcgcctccatggcgccgcgatagtcgaccggcacgatgcgcggctcgacgccggccgccgccgcggcggctcggacgaggtcgccccatcccaccggctcggggtgcgcgcagttgaaggcctcggcttcccacggctcggcctcgaggacgctcacgacgaggcgcacgaagtcgtcgatgtggaggaactgcgtgagcgcgccgccgacgggcacggggacgggatggccacattcgaggcggtcgaacagataggcctcgcggtagaggttattgccggggccgtagaagtaggcgggtcgcaggatcgtgagggagcagccgcgctgcggacgctctgctacgagcagccgctcggcctcgagcttccccagcccgtaggcgccccaaacctcgttctcgcccgtcggcgcgtcctcggcacgtgccgcatcggagggcgcgtacaccgcccccgagctcacgagcacgtagcgcgccccgtcgagccgaagcgtgtcgagcacgggagccacatcggcggcagtgtaagcggacacgtccaccaccgcgtcgaaacgctcgcctgcaagctcgcgcaggctggccgggtcgcgccggtcggctcggtagtgcctggcgaggccgccgtacgccaccggcaggcggccgcgcgtgaggatggacacgtcccagccgcgcgcgatcagcccctcggccacggcccgtcccacgaactgcgttcccccgagcaagagcacgcgcatggcgctccccttccatcaggcgtcgatgcgccccatggtacactatccggcgtcgaagagggaaaggcgaccgatggcgaagaaccccggcagggacgcatgggcgaacggcggcaagggaaaagttgcaggccagccacgcggccaacaactgcgcgcaactaagggcctggggcccaacaaagcctccggccacaagggcggcatctcccgccaaggatcgaagcgcggctgaacgaaaatgtcccgaatgggaccgccccctattggggcattcactccagatacgcccccgtctgcctgctccacaggttcgcgtaggccccgccggcctcgatgagctcggcgtgcgggccgtcctccaccacgcggccgccgtcgagcaccacgatgcggtcgaggctggccaccgtcgacagccggtgcgccaccacgatggccgtgcgcccgcgcatgagcgtggccagcgcgtcctgcaccagctgctcgctctcggagtcgagcgcgctcgtggcttcgtccagcacgagcaccgggcagtcggccagaagcgctcgcgcgatggcgatgcgctggcgctggccgcccgacagcttcacgccgcgctcgcccgtgacggtgtcgaagccctgtggcagccgctcgatgaactcgagcgcgttcgcctggcgcgccgcctcgcggatctgctccatcgtggcgtcgggcctcccgtaggcgatgttctccgcgatggagcggtggaacagcagcgcctcctgcggcacgtaggcgatctggcggcgcagcgattgctgggcggcctcggagatgtcctgcccgtccacgaggatgcgcccctcctggatgtcggacaaacgcagcaaaagcttcgtgagcgtggtcttccccgccccgctcgcacccacgaggcccacgcgctggccggcggggatgtgcaggtcgaggtcgtcaaacacccgcgtgcgcgcctcgccgtcggtgtaccagaagccgatgtcctcgaagtcgatggcgccctcgcgcacctcgagctcgggcgcgcccggcttgtcggccaccagtcgcggctcgtcgaggatcacggtcatgccgctcgcgtcgccgaacgcgcggttgaagcgctgcaggccgttgttgatgaagttgaactggttcgtcaccgtgtaggtgtacgtgaacatcaccacgagcgtgcccggcgtgatgccgtaccacgcgttcccgcccgcgatgaacacggccaccacgctcatgatggcgatggtgatgcacgccgtcacgatgccgcgcgtgagcgacgcccacatgcgcttcgagtcgcgcgccaccacctcgcggttcgcctggtcgaacagcccgcgctcgtagtcctcgcgcccgtaggtcttcaccgccaggatgttggcaaccgagtcggacagctcgcccgacagctggttctgcgcgctggccgcctgctcgttcaggtgcaggatgcgcttgtacatgtagtaggacacgcccgcgtacaccgcgagcagcgccatgaggatggccacgtacaccggcacgcgcggcgcgaggatggcgcacgtgaacaccaccgagcagatgaccggcagaaacgggaaggtgatggtttccagcagcagctggtaggcgctcatgaacttggtcgtctggctcaccagcgtgccgccgaagcgattggaatgaaacgacatcgactggttggacagcgcgtcgaacgacatggtggccaggtcgtaggaggcggcgatctgcagccggtacatggcgtagtcctgcaccttgctggccgcctggccggccacgttgatgaggatgagcgcgacgatgtaggggccgaacaccgcgaacacctcggacgtgcccaccgagcccgcgctcacgcggtccaccacgagactcatgacgtaggggttgccgtacgacagcagcgccacgaacagaagcgtcgcggtcatgagcgtggcgaacagcccgaggtgctttcgggtgaccagccagaagtagtgcagcgtgcgtcgcgtcgtcgacggagcagcggatcgtgccataggattctccttctcgtatttcaagaagattatcgcacacccgtgcaaccccggccgcgcggccagcgcgccctaccccaccagcttcgaggactccacctgctccacgtaccagctcatgaacttcgccagcggcttgcgcagcacgaggcctatgacggccgccggtaccaggaacagcgcgagcaggcccatctcccaccagaagtcgcccccgtaggtgccgaacatggccgcacgcatggcgttcaccacgtgggtggccggcagccagggactcagcccctggatgaacggcggcagcagctgcagcgggaacgacccgccgcaccctgtcacctgtatgatgagcagcagcaccgccacggccttgcccaggttcgcgaacgcagccacgagcgcgtatatcaggaacgtgaacacgagcccggcgagccagaagcacagcatgaacagcagcgggtgcgtcacctgcacctgcaagaacagcaggttccccaggcccatgaccgtggtctgcgacagcgacaggaaggccatcacgccgaagcgcccgaagaacagctggcgcggctgcggatcggccagctgcgcgcgcacccggccgggaacggtaggcttcactaccaccagtatcagcaacgacccgatgaacagtgcgagcgtagtatataaaggcgccatagccgaaccgaagttgtccacggggaacacggccacgcggtcgatgcccacaggcgccgcaagcgccttcgacagcacctgcgtgtcggagcccagcacctcgcgcagcaggtcggcatccccggcaacgagcgcctggtcgatgccgtcggccagctcgcgcagcgtagcggaggcgccgtgcagctcgcccacggtcgcatctatcttctccgccgccccgcccagcaccgccgcagcggaatcggccgaatccgacagcccggatcccgcggcgcgcagcccgtccaagcctgatcccacgctcgcgaccagcgaggacgcctcgtcggccagcttctggagccccggtttcaggctagtgtcgaactcgtcccgcatcgtagccgcaccctgctgcgcctcgtcggccaaccgcttgatctccgcgcgctccgcctgcacgtcggcgctgcccgcctccagcttgtcggcggcgcttctcatggtgtcgcgcatgttctccaaaaggccgatggtggcgttcatgcgcgcgatgacgctctcgagcgcctgcaggtactcgtcgggcacctggtcgcgcagcgcctccagctgcgcgacgatgctccggcatgccgcaacctgcccgtccagggcatcggcctgcccgcgcagcgcggccacgctgtcctgcgagccggtggcggcggcatcgaacagcgcatccgcggatgccgacacggcggcgaagccctgcccgccgtccgcgagcgcctgggacaatccatccgccgcctgccgcagcgcatccaccaggcttgcggccgaggccgcaccctgcgacgccgtgctccccaggccgtccgcctggtgctgcgcagcctccaccagctgggcggactcgcccacgagcgactgggcggcccccgccagcgacgagtacagcgtgagcaccgacgccatacggtccacctggtcgcccatggagcgcacatgcgctgacagatcggcgatgcggccgcccgcgtcggactcgtcggcgtaatgggaaagcgactcggcaatgctcaacgccacctcggagagcgtctcggcaaacacctcgttcacctggtatgacaccgagtccgcacccctgtcggtgatcttgggggcaatggcgctcttcttctcgttcgcgtagtacacgatcttggcgtgctgtacgtcatcggagtagaacgtcagcatgtcgcggctgaaatcgtgcgggatgaccacggccgcgtagtaccgccccgacctcgcgccatccaccgcatcctcctcggtggtgaacgtccagtcgatctcgtcgttggcgcgcaaggcggacaccacctgctcgccgatgttcacgcgcaggggcacgaggtcgctctcgtacccgtcgtccacgttcgccacggccacggtgaggttgcccgtgttatcgaagacgttccagcacgcgatgatgttgtaccaggcgaagatggacggcatcaccacgagcccgacggtgatgatgatgttcatggcgttcgagaacaggcgcctcatgtcgccgcggaacaggtgccagacgttgctcatcgcacggcacccccttccgcaccgtcgtcgccgtccgcggccgagcgctccatctcgttgcgcgaggcgcccagctccagcagcccttcgtcggtcatgtcgtcgagcctcatctggcgctcgaagctgtcgcgcaggctctcgaccaccaccaggaatacgaacacggccacaagccacgcgagccacgccgtgagcagccacaccttctcggcgggcgtgagcgcgaacaccaccgccagcgccaccggcaccgcaaggcccagggccacggagccgcggataagccgcgggtaccagcgtgtgaagcgctcgtagcgtacgcgcagctcctcgcggtactcatccctgcccgacagcgcgcggaacagctgcgagaaacggtacgggcgcgcggggatctccacgtcctcgccgttgaagatgccgccctgccgcacctggccggccaccatgcggttgacgttcgccatcaggggccgcagcaggatgccgaaggccatgaacagcacgaagaagaacgccagcatgccgatggcgtcgccgtagtgcgagccgtagaagccgcagatagcctcgcgcatggcggagatgccgtacgtgaaggggaagaacgggtacacggcctggaagaaacccgaggtcatctcgatggggtacagccctgtagccccggggatctgcgcgaacacgagcacgatgcagatgcccttgccaatatgctgcagtgtcaccgagagcgcatagatgatgctgaggtacgaaagcgacgccaccgccgccgcgaagaacagcgccggcgcactgacagcctgcaccccgatgaccagcactcccgcacagcagatcaccgcctgcagcacggccatcacggcgagcagcgcaaagcgccctagatagcgctgcgtgacggtaagattgcggatgccctcgccgtccacctcctgcttcatgatcaccaacagcatgaacgcgccgatccaaaacgtcaggttcatgaacagcggcgccatggccgaaccgtaggcgttcagcgggtagagctcctctgtcttaagctcggtgggcgatcccatgaagtcggcgatcttcgacgcgtcgagcccgtcctctcccaccagcttcgccagcacgccggactcgcccagcgacagcacgtccgtgcgcacggtgtccaacccctcctccaggctggccaggatgccgtcggtctgcccgagcgcgtccttcgcggtgcagagcgtggataccagctggtccaacacgagcgaggtctggtccaccagcaaacgctggttcgagacagcggttgccagcgacgacgacgccgcgcccagctgcgccaggctcccgttcacggcggggatcgtggtgccgaacaggttgtccgaataggcctgggcgcccgcgacggcctgctggacggcggcgttcaggtcgttgcccgcttgggccgtggcctgcgagatgttttcggtgtctgcgctgatgcgggtgaggtcatcgagcgtggcctgggcgtctgcagcctgctgctccagctgcgcggcagcctcggcaagcggctgcttgcccgggttgtcctcgggaagcccgtcggcgacgctcttcagatacgccgccagcgccttgtcctcgtccaccacggcctgggcctgcgcgagcgtcgcccgcacgcttccctgcgcctcaccgatcgtgcccgcgatgtcccccaccgcctggttcgccttcgacgaggcctgcgacaccgatgacaggcccgtgcccaccgccggcatgaccgcggcggagaagctcgccagcccgtcctgcatctgcgtcgtcaggccggacacggtctgcagcgcgtcggacgccgtccccaggtcggcgcgcacgcggcagagcgcgtccttcgcgccgcccaccttggcctgcgcctcgtcggtggccgactcgatgcccgcaagcgaatcgcgcgcctcgcctaccgtctgcacggcctgggcgatcttttccaccgcctgcgagcgggacgcgtccagcttctcgcgcgactcgccaagcgcctggtcgatggcatcggcggccacgtcgctcacggtggaaacgaacgtggagttgatggtctcgtcgagcgtgctggcgccggtgtcggtgatcttcggtgccaccgggcccgccttctcgttcacgaaatattccagcttgggctgcgtgaaatcgccggtggtgagcgagagcagctgggaggtgaagtccgcgggtatcacgaacgcggcatagctcttccccgcgtcaagctccgccatggcgtcgtcgcggtcgacgaacacccagtcgagctgcgtgttcccgtgcagctcgtccactatcatgtcgcccacgcgcagctcgccggtcagctcgctcgagccgccctcgtcctcgttcaccacgcacacgcgcagcgcgcccgtattgtcgtaggggttccagaagcccacgacgttgtaccaggtgtacaccgacggcagcacgagcagcgccagcaccaccacgagcgccggaggcgttttgagcaagcgcagcacatcgcgcttgagcacccgcaaaacgtttcccatagccgctgccgcgccctttctccgcctgataaataccgaacaatgataaccctctcggcacgtaacgtcacgcaagattgacgaacacgttacattcgtcaacctctcggctgccggcagccgaggcgggcggaacgcggcgtgccgaaccggacggcccgcaccgcgcgaagccgaagcgccgcgcgcattccatctcgcccgaacccgacaggaccccggcgttcaatccgcctcccgacgtatggcgggcccccgggcgtgttggcgcggggcccgccgctcccccgcaaacgcgggcgctaccgcgtctcgtcgtcctcgtcgttgcccagctccttggcggcggccttctgctgcttgttgaactggtcggcgctgcgcttctcgtactcggtggccttcttgaacacggtgggctggttgatcaccacctgtgggaacgggatgctgatgtcgtgcttgtcgaagatcagcttcatctcgcggttcaggtcgcgctccagctgcaggcggtcgctctcggcgcactgcaccacgatgcggatggtcacgctgttgtcgcccagctccaccacgcccttgtagaacgggccgtcgatgatggccggcagccgcttgcggatgttcggcagctccttggacaggatgttctccacgcgctcaagcgactcgccgtactcgatgcccacatcgcacgaggcgtaggacgtctccttcgtcatgttgaccacgttgctgatgtcgctgttgcggatcaccttgatgttctgcgagccgtcctccaccttggtggtgcgcacgcctatctccaccacggtgccgcgccagtcgcccaccttgatgatgtcgcccacgcggaactcgccctcgaagatgatgaacaggccggagaggatatcgctcaccagctccttcgcgccgaagctgatggcgatggacaggatgccggccgaggccaaaagcgtggtggtgtccacgcccaccagcatgaggcagtagtacaccatgccgatgatggtggcgtacttgatgaagctgcccagcaggcggcacacggtctcgccgcgcgcgcccagcacagtagccagcaggttcagcagcttctgaacgagcgtgaccacggtcagcgccacgcacacgaacatgatgcacgccgtgagggcgaacacgttcacgccgcgctcccaattaccgcccaggatgtaagagaagatcgagccctggccgaagatgctctcctggaacaccacagctgcgaacacggcgatcacgaacacgcccacgagccagcgcaccaccgtagccgtcttctgctcggccgtcttctcgctccacttgaacgagcgggcaatccagcggctggctgccgattcggtcttggccgtgcgcccgctcggcatcttcacgtcgatcatgcgcgcgtcggcctcgaccggcgccttggccacggtcacgctgcccctcggttcgaaggccagcagcagaaatatcaccacgaggcacacgagggccacaccgcccgtggccacggtgagcggcacgcgctcggccatgagctcgccctcggtgccggcaacgtacaggaagtagttctccgcctcggccgacgagacgtagtacgtcgttccctccacggtgaggtaatcgcagtagccgtccttcagctggctctccgtcatgccgtgcgcgagcgcatccttgccgacaagtcgctggtcagggaagtacgcgaacgtatggtcatccttgctcacggcgaatgcgaacccttcggagcccaccttcacgccgcccagcacgctgtcgacggtgacggtctccagcaggttctccaggcgcgtcgcgcgaatgccgatctgcacggcgccgtccacggtgccggccgcgtcgtgcagcggcacgccgatgtactggcgcagctgcccggatatctcgtcgggctgcgcttcctgcaccaccgagtccgcgccctggagcagcttgcggaactcggaggactggtcctcggggtcctcgctcagggtaaagttcgcgtaggaggagttcgttgcggtcatcacgccgttcccgtcgtacgtgaacacgtactggatcatgaggacgtccgccagcttctgcaggtcgtcgcggttctcgagcgccgggttctggtccaggatgtagccggccacgcgcgccttgcccagatagcgctcgtcatactggctgatgagttcgtccatgcgcgcttgggtacgctgggtggtctccaccacctcggcggcgcgctcgttgtttgccacggattgggatgacagggcgaacagcgtctgcatgtagaacgatacgcccaggatggccagaaagcccacgaacgacagcacggcggccttgcgccctattaccttgttgtagcgcagcggcccgacgtgacggtagtcctcgggactgcgcccctcgcgctcgtcctcgcgcatgacgaagatgccgtacatgatgaccacggccatgaccgcgaagaatatgaagaggatcacgcccaccgtgacgttgcgggtagcggccatgtcgctctcgggcacggcggcgatatagtaggtgtcgccgatcttgctcacatggccgtacagattctcgccggcaagaaccatccacgcgtacgcgccgtcctcgaggtcggctacgtcgatgccgccatcgatggcgtcggtgcccacaagaaggtcgttcggatggtactcaaccaagcaatcctgcgccgacacggcgaacatgaagccatgctggccgatggcgatgttcttgagcacgcttttcgttgagcccgtgtcctccacgagctggcgcagctcggccgggtcctgctcgaccaccaccatggaaccatcgtcgatgcgggcagcgtagtagcgcttgagccagttctgctcgggcagctccacctccacggccgcggagggctcgccgtcatcgaacacggtgcgcaactggttgaaacgcgcgtaggcgaagtccgccggggtgtcctgcgccttcgcgacgatagcgccgtcgcgcgacaccacgagcacgttgtcgacgcctaaaaggtcctggtactcgaccatcttcgcatcggtcgctgcgaagccggcgtcgttgttcgccatgaaagccacgctcgccgccttggactggtatatctcgtcgaaggtgacggtattctgctccacgccttcgtccgctgacgccaacaggccctccagcgcgtcggattcttgccgcatctcgctcgcgtagccgtccagcgacagctcggtctgcatcgtggacagcagaacgcccatgaccgccatgctcgcggctgccaccaaaacgaggacggcgatcttgaccttgagttttctcgacatgccccatcgcctccctagttccacttgtccgtgagcaccgcaatggtgccgtcgtcgagcatgccctggatggcgtcggagaccggcttgctcaacgcggagcccttctgcgtggcaacgccgtattcctgcgtgtcgatgacgtagtcgaggatgctgcggtcagcgttcaggtaggtatgcgcaatggcgccgtccatgcaggccgcatcgatggatccttcttcgagcgcccggctgaggtcctggtaggacgccatctgcacgaggcggaagttgtcgaaccgggtcatcgagtggtcctcggtctgctccagcgcctcgcccgacgtgaagcccgactccgtcagcttcagcgccagctgcggggcggtgttcgtccccgccatggtgccgaacgtgaggcccttgaggccatcgatgcccgacacgagcgaactgttctccaccatcacaatggaggcgtccgtgtagtaggacggcgagaaatcgaagttcttctcgcgcgactcggcgatggaatagcaggctaccatgcagtcgacgtcgccgtttgacagcatgtccttgcgggtgtcgggcgtcacggtcacgaattccacggtgccgtagcccatgcgcgcggccatctcctcggcgatgtcaatctccaagccgtagtacttgcccgttccctcgttcaggtagccgaagcccaccacgtcgctgcgaacgcccacgcgcagcgcctcgccgttcgccggggtgcccttggcgccctcgccactgccgcatcctgccagccctgcaagcgcccataccagcgccagggcgacgagtagaagcgtcgcgcccctcgtcctcaccttgcccatgtgcttcctcccatcggataaacctccgcccggccccgcatgcctgtcacgcatctgcgggcctgccccgaaacatgcgctcggccgcgcaaaggcggcaaagcgcatcaaagccgcggcggcgcggctccaagaaggtaagtatgccaaaccggaacttgcgaacatgcgcgattgccggttcaaaatttttttaaggggctgttcagacgagggtatgtgcttctatgccgacaacctcgcatgcggaaaacagcggcgcccgggaaggatcccgggcgccgaggaacttggtgagggaggggcgcgccgccgcgcctttacgccgccaggcgcttcgcgatggcgaggatgaagtcgcgggtggagagcttcaccgggttcggcagcgtggtgatgagggccaggtcgcccgtcatctcgccagcctcgatggtgtcgagcgtggcgtgctccaggcggtcggcaaacgccacgaggtcgtccaggccgtccagctcgccgcgcttgcgcagcgcccccgaccacgcgaagatggtggccaccgagttggtggacgtctcctcgcccttgaggtgcttgtagtagtggcgctgcacggtgccgtgcgcggcctcgtactcgtagtacccctgcgggctcaccagcaccgacgtcatcatggcgagcgacccgaacgcactcgacaccatgtcgctcatcacgtcgccgtcgtagttcttgcacgcccagatgaagccgccgtcggccttcatcacgcgcgccaccgcgtcgtcgatgagcgtgtagaagtactctatgccggcttcctcgaagcgcgcggcgtactcggcatcgtagatctcctggaagatgtccttgaaacggtggtcgtacttcttcgagatggtgtccttcgtggcgaaccagatgccctgcttcacgtcgagggcgtactcgaagcagctgcgtgcgaagctctcgatggacgcgtcgaggttgtgcatgccctgggcgatgcccgggccgtcgaactcgtggacgagctcgcgcgtctcggtgccgtcggccgcagtgtacacgagctccaccgtgccgggaccgggcacgcgcagctccgtgttcttgtacacgtcgccgtaggcatgacgggcgatggtgatgggctttgcccagttgcgcacgcacggctcgatgcccgccacggtgatgggcgtgcggaacaccgtgccgtcgagcagggcgcggatggtgccgttggggctcttccacatctgcttcaggtcgtactcgtccatgcgcgcggcgttcggcgtgatggtggcgcacttcacggccacgcccaggcgcttggtggcctcggcggaatccacggtcacctggtcatcggtggcgttgcggtgctcgaggcccaggtcgtagtactcggtcttgaggtcgacgtgcgggcagatcagctcgtccttgatcatctgccagatgatgcgcgtcatctcgtcgccgtccatctccaccagcggcgtggtcatctgaatcttcgccattgtcagcctttccctcgttgcgcggctcgcccgcatcccgtgtgtactgcgcaatcataccccagcccaggcccgcgcaggcgcatcgcgcgcaaaaccaacgacatcaccggtttttggaaatgagcgcgaaacaaagggctcatcgggcagcgagcgccatgtaaccgtcttcaagggtgggctcaacgggcgccgatcctgcgggcggcgcgtcgctcactatgcggtagcgcgtgccctgggccgtggtcgccgcattcaccacgacggctcccgccggtggggccatgagcggcggcgtgagccaggtgcgtccgtgcgcgccgtcgatgaggcctgcggtggcaccgtcgtactgcaggcgtcccccgcgaagcacgcacacgtaagggcaggtctgcgccacgtcgtcgaggatgtgtgtggacagcaccaccgtgcgctcgccgccgagcgtggccaggagcgtgcggaagcgcatgcgctcctcggggtcgaggccggccgtgggctcgtccaccacgagcaggcgagggtcgcccatgagcgcctgggcgatgcccacgcgccgccgcatgccgcccgagaagccgccgatccgccgccgacgcacatcggtcagccccacgcgctcgatgagctcgtcggcctggcggcgccgcgcacgccggtcgtccatgcccttgaggactcccacgtagtcgaggaactcgggcggcgtgaggttgggatagggctcgatgtcctgcggcaagtagccgagggccttcttgagcgcgcggcggttgcgcggctcggacaggtcgcgcccgtcaacaagcacgcgtccgcgcgtggggcccacgatgccgcagaggatgcgcatgagcgtggtcttgccggcgccgttgggaccgatgagcccgatcatgccggaaggcaggtcgagcgtgaggccgtcgagggcgcagggcttcttcgggaagtccttgcccagacagtcgagggagatgaacatgggggtttcctttcttgagtgctcagcggcgccagtaggctcgcctgcgggcgatggcgccggccgccgcgatcagcgcgacggcgatggcgagctcgagggcgagcagcacgacggactcgaggggcgtagcagccgcgacggttgcggcggattcaggggaatcgagcaacggcgtgctgccgaagaatgcctgcgccacgggattggccgcgatatggacccgcaagccgcctccggcagtgggagtcggcacgaacacggtgaggaagagcaccccgatccaggcgacgatagccgcgatccgcgcaaaggcccgcggcaggaacgagccggcaaacgccgaaagcgacgccgcgatgagcgcggacggcaacactatgccgatcagcaggaaagccgcctggggcatcgcccacgcgttgccgtgcagcatctggccacccgcgcagaacagcagcacccctgcggacggcagcgccatcgccgcaagggaacccgccacacgcgccgcaaccaactcgaacgaaagcacgggtgcggacgcctcgatctccgagatgccgagtcgctccgcctcggcggccaggtcggtgaaggccgccgcgtaggcgatgggaggcagcagcgcgagcatctgcgccgtcaaagcgagcgcggtcggattgcccgtctcaaaagaaagcccggggttcacggtgatcgtgatcgacagcaacgcgagcgcgaacgacacgatccaaagcgcccgctgccgtgcggctaagcggaaatgcgtgcccgccaacgacaagaacctcatcgcgcacctcccagcttgcgccacgcgtactcggacgcgccaagtgcgcgccagacgcaagcgcagagcaagcacagcacgagcagcggcagcccgcgctgcagcacgagctgcggcacgttcggatcccaaacgagtgcgaagaacagccaaaccgccacgatgacgagcgcggcgctgcgcgaagaacccgcgagcgccgcggccgcgtacgccgccagcaccataagcgtcgcgccgcccaccggcgtgatggctcccgcccacccgatgtcgcggtacacgaggcccagcgcctcgagcggcacgaacatcacgagcgcgccgactgctgccgccgccagcacaatggctccgcgcagcgtctgcaccgcacggaactccgccggcgtggccgcctgcacctctacgagcgggtcgcccgtgaacacggcgacggcgcagacgcccaccgcaaggggatacgcctgcgtgaaggcgagcatcgcatgcgtagccgccatcgcgcccgccgcgagcacccagcatgcgccgacggcggcgatgcacgctccaacggccaccggcacgacgatgcccacggcccgcacccgccgcgtctgcgcagctgcgagcgcgcgcagctgcgatccggtcaagcggccgttgccgctgccataccctgcatccatgcgaagcctcctcaatctcatgccgcctccatgtgagcgaccagcgccctgcgcgccgtgaccaccgcaaccgcaagcaggacgcatcccgccgccgccatcgctccaggcccgacggcgccttgcagctgcgcgatcaccgaaagtgcaccgccgcccgccgccacacgacctaccggtaccacgagcggcacgagaaccgcgccaaccaccgcgcctgaccacggcgcgttcgaccacaccgcgacgaacgccgaggcgcccgcgacaacggcgaggggcacgagccacgaggacacgagcgctccgagctcaaccggcgcgccccaccaagcgaacgccgccgaggcagcgagcccggcgagcgcatcgacgcccagcaccaccgccagccgcgcgagcagcacggtctgcggccccagcggcatggccaacgccagcaggccggcggcatcggtcgagagcgcggccgtcacggtgagcgccgcacccaacagcaaaagcgccgagagccaccagacagccccatccccatcccagcctgcgtcgacgaagcacgccacacccaccgccagcgcggccatgacgagcgccatcggcagcaccgcccacggcatcgcgcgcacctgcgcagccgccaagctcgccgccagccgcgcgcttttgcgcaccgaccaagccggcgcctcgaagatcgacggctcgccctcgatgtgcgccgcgatgcacgcgaacgggggcacgtcggacgcgcacgcccgttcctgcatcctcatcgcctcgcgcaacgccgcgcgcggctcggtttcatccgtgttcatactcgcctccccaaggtcttctgcaacagggctcgcgcgcgggacacgcgcgacttcaccgtgcccaccggcacgtcggtcacttgggcgatctccgcatagggaagctcgtgcagccaagcgagccgcaccgtttcagccaacgccggctcgagggcgtcaagcgcggccacgatctcgtcgagacccgcttgcgcaagcagcacctccaacgcatcgcccgtctcgtcggccagctgctccgtcccgtcatcgagcgcgcattcgacgggacgggcgcgtcgcatacgcacgtacacctggcgtttcgtgatgcccagcagccacgtgagcacccggctgtcgccgcgaaacgcgcgggccgagcgccagcagcccagccacgcgtcggcggccgcctcttcggcaagctggcgatccgggcagcgcgccaaggcgaacgcgagcacggccggcgcgtagcatcggtacaattcctcgagcgcgccttcatcgccgcgcgccatgcgcgcaagcgcggcgcgtgcccgcccatcgtccgcttcgcactcctccatgtcaccgcccctcattcccgtcgtcgcgttcaaccccttagtagcgccgaagaagcgcgaggttcacgggttcccgattttttcgcaaccgcaccgtccgcctcaaaaatcgccctcaaatgcagctggcccggagcgcatgctccgggcccgtcgattctgtctgccggaatggcctcgcacggtcgcgggcgcagccgtgccgacacggccgcgtctcaaccaagcgcgtcggagcctactcccccagctcctccgcaaaccccacgcggtagttcttgaacacggcctcgccttcttcctgggtggcgtccagatccacgtcggccgcgatggcgaagtcgtggtcgccctccgggtcgctgaatatctggcgcacgtgccatacgcgctccgccttctcgttcgcctcgtcgatcgccaggtaggccgccgaacgggcgtcggcgtcgatggcaatggcctcgtgcgcctcgaagtacgcgtcgagcgcgcgctgccagcgcggctcgccgcagccccactcctggtcgagcttccccagctccgccgtgcggccctgcgccgccagccgcacgcgctggaagagcgcgttgcgcacgagcacggtgaggcctcggcggtcgcgcaccacggcgtcggcagccgagggcggcgcggcctcgaacatcgagcccgcgctctcccattcgtccaccaggctcgagtccaccgagcgcaccacgaagccgagccatgcgatgatgtcctccagccgctcgtcgcgcttgtcggcaggaatcgtgcgatcgagcacgcggtaggcgtcggccaggtagcgcagaagcgtgccctccgagcgcgcgatgccgtagcgctgcacgtagcccttgaagtccgccgcaccctccagcatgtcgcgcagcaccgacttcggcgccagcgcgaagtcgcgcgcccacggcacctcggcgcagtagcgctcgaacgccgcctccagcaggtcctccagcggccgcgggtacgtgacgtcggcaagcttctccaggcgctcctcgtactccacgccgtcggccttcatgtcggccatggccttgtcgcgcgccgcgcgctcctgggcgcgcagcacctgccgagggtcctccagcgtggcctccgccatcgatatgacatcgaacgcataggtctcgctctcggggtccagaagctccagcgccgccagcaaaaacggcgatagcggctggtcgagcgcgaagtcctccggcaagtccaccgtggtcacgtactccacggcgccgtcctcgccctccacctgctcgatcacgtctgcgttggcgagcgtgtcgaatatctcgtcggcgcgcaccgagagcgccgccttctcctcgtcggtctgggccgagtcggcgatgagcttccgcacgcgagcgtacgcgtcgccgccctgcaccacctcggacagcaccatggaatgcgtgatcttcatgcgtggcttcagcgtctcgggcacggcggctatcaagcgctcgaaggtttgcttgttccacgtgacgaacccctcgggcggctgcctcttctttatcttgcgcagcttcttcgggtcgtcgcccgccttcgccaccagcttcgcgttctctatgtcgtgctcgggcgcctcggcaatcaccatgccctcggtgtcgaagcccgaacgcccggcacggcccacgatctggtggaactcgcgggcgcgcagccggcgcatcttatggccgtcgaacttcgtgagcgccgtgagcaccacggtgtggatgggcacgttgatgcccacgcccagcgtgtccgtgccgcagataaccggcaggagcccctgctgggccagtttctccaccagcaggcggtagcgcgggagcatgcccgcatggtgcacgcccacgccgctggccagcaggcgcttgagcgtcttgccgaacgccgtggtgaagcgcgtccccttgaccgcttccttcacctgctcgcgctgctccttggtggccacgccgtagctggacagcgcctgcgcggtggcgagcgccgcatcctgcgagaaatgcaccaggtacagcggcgcctcccccttgcgcagcgccagctccaccgtgccctcaagaggcatctccacgtactcgtattccagcggcaccgggcgcggcgcgtcggccaccacgtccacgtccgtgcccgtgcgctccttgagggacgccgcgatggcgctcacgtcgcccagcgtggcgctcatgagcaggaactgggccttcggcagcgtgagcagcggcacctgccatgcccagccgcggtcggcgtcgccgtagaagtggaactcgtccatggccacgcagcccacgtcggccccctcgccctcgcgcagcgcctggttggccaggatctccgccgtgcagcagataacgggcgcctccgcgttgatgtgcgcgtcgccggtgatcatgcccacgttctcgcgcccgaggatgtccaccaggtcgaagaacttctcgctcacgagcgccttgataggtgccgtgtagtatgcacggcggccggtggccagcgccatgaagtgcaggccgagcgccacgagcgacttgcccgagcccgtgggcgtgcccagtatcacgtggtcgcccaccatgagatccatcagggcctcctcctggtggggccacagctcgatgccgcgcgccgccacccagccaaggaaccggtcgagcgcctcgtcggccgtgagccacggctccggctcaccctcgccctcctccggctcccaccacgtgggcgccagccgcccgagcgacccgtgcgcaaaggcctcgctctcgacggattcgtcacgcgccgccgttccgtctgccgcttgttctgtcatgaggaagcctccgcaatggttcgatcgtctcgtcgactgcgtattctacccggacttcccgccaagagccttgtacggcggcaaaagaacatgcgtcggcccgcataaggcaggcaacaggcgcacgcgagctggctgcgtttcgcgaaaaaggcgcctccgagtcaccgttttggctgctctgaagttatcagatgatgccgaagccggttttgcgcgccctagcgaatattccggcagcgttttccctgccagctttggccgacctctcctgaccgaggtgcattaagcttcagggcggccaaaacggtgacttggaaggcccatgaaggcgaaacatcgtccatcgtgcgatgggcgcgccttccactttctcccgcccgcgctacgcatgctgctatacttctactccacagacatcgccgagttcgcagcgaacaagtttgccgaccgcagctcgctggcgtcgcacggcatcatggccaacgttcaagtctccactgccaatgtgatgaaggactcggctgtcaagggatgcgctgaatcgagggaggtccaatgagcgaacaggatacggcaagctgcgcacaggcgaagaccgcggctctgcgcgttcttcgcgcgcccgagctctctggcaaggtgttcttggaaggcgggctcatgccgtgggtgctcggcggcggagattcgggccgcaagcacggcgacgtcgatttctcggtgcgcctcgcggacatgcccgtcgtgcgcacgtggctcgaaagcgcgggacactacgaccccgacctcgactcgcgccgtttggcttgcaatgccgcaggcgaggacttcggcatgcatgcgcgcatcgacggcgtgctcgcaagcttcgcgcccttcttcctgcgcgacggcttgcttatacaacgcaacgcccagcaccgggcctttgccggctacgacgcgctgctcgaggcgacgatcgaagggcttgcggaggaggacttcgtggagatgcgcaagctgcccgacggcacgcgcgccggcgtgtctaccgtggaggcctgccgcgcggcgaagatggcgagcgaccggcccaaggatctcgccgacatcgccgagctcgaccgccttggctgggacgaggtgcgcatggagcgcgtagccggcgcgttcgccacgatgggggtgcgctgtcccgctcacgagaagtagtgcgctaccccagccccagcgcgcccgcaacgacccatgccatcgccgcgatccacagcaccgccaccaccacgcgcacgccgttcgggacgcgcaggttcttcgccgggatcatgagcatggcaatgagcccgcccagcgccccgcccaagtgcccgctcacggatatgcccggcaccaggaacgtgtacaccacgttgatgccgatgatggcgagcatgctcttgctgtactgggcgaacacatgccgattgcccttgtgcagcacgccgagaagagccacggccacgaacagcgcgaacacgctcgtcgatgcgcccgcgctcaccgtgggcatcccgcccgccagcacgtcggccatatacgacacggcattgcccgtaatgccgcccacgaagtagagcgcgaggaagttgccgcgccccagcacccgctccagcacctcgcccacgctgaacagcgccaccatgttgaagcccaggtgcatgaggtccatgtgcaggaacatgggcgttacgaaccggaacagctcgcccgcctgaacgagcggcgcgtacatggcgcccatgtccacgagcacgcgcgtggggatgtcgagcgagacccccatgcgcgccccggccagcagcgatatggccgcctcggccgcgaacacgatcacattgagcgcgatgagcacgagcgtcaccaggcggaaccggttgcgctcgaagaacccgggcgtgttcgcgttcatcatgcgcttcaactgctcgtcgtcgatgacgggccgcgcaggcgcgtcggggtcgttcaccttgtaaggcacggaaggctccttgctgattcgttctgccgaaagtccgaaccagcataccatcaccgtccgtgtgaagggaggcccgcgggcctcccttcacgtactcgccagcacccagggcgcgccgccgtgcgtgccgcgcctgccgtgccagcagccttcccgtaccgggacccgccgctatcccagcggcagcgccagctgctcgggcccacccggctcatcgcagggcggccagcgatgccgtgccatatcgatggtctcgtcgtccacgaacgccacgccctcgtcttccagcagctgccgctgcacgcgctggccgccgaacgcgtaggtgggcgcaagggttcccttggcgttcactatgcggtggcacggcaggttccacccgctctgcacgcggctcatggccaggcccacctcgcgcgacgccttgggataccccgccagctcggcgattgtcccgtacgtgcacaccgagcccgccggcacgcgccgcacctgcgcgtacacgcgctcgaagaactcctcgtccatctcgatcatccccgagcccttcgcctggcccatcgcgcacccccctcaccttccgtccacctcatcatagcagcggaaaacgtcccgcgaaacgcccaaactccggaaagcgcgcctgctcggcaatcgtggatgccagcccgatcgtatggaatggcccaatgcgcccgttgctcgtgctcggccaggcacggctcgcaatcggcctcgcgctcgatgccttggccgcgttctgcacctggatcattcaaccgcccagccaggaggtgctggcgaagctgccgccgcgcgccatgagcgtgctcgcggcggcgggctcgtcatgccctgcaccgtcaagttcgtccaaacgcccaaccgggcatcgccgaaccgctctctaaaggctcgcccgcagcacctccaccacctcgtcgcgcgagagcgggtggtagccgccctccatgggaagcgtcgcctcggcgatgccgtcgagcatgccctcgtccacgccgagctccgacaggcgcatcacgcagccgatctcgcgcgcccacgcctcgagcgcggcaatgccggcctcggcaagctcctcgtccgcgcgcccatcgccctccacgccccacaccgtgctggcgaaccgcgcgaacttcggcaggccatacggcgcgatcaggcgatagtacgcgggcgacaccgccgagagcgtcatgccgtgcgtggcgtcggtgtaggcgcccacggcctggccgatcatgtgcacctcccaatcggtggacttgcccatggccacgagcgtattgagcgcccaggtggccgcccacatgatgttgctgcgcgcctcgtagtcgcgcaggtcggcaacggccgcgcgcgagctggcaacaagcgagcgcatgaggccctccatcaggtagtcggacacgttgtcgtcctcgcccgagaagtactgctccatcacgtgcgacatgacgtcgaagacgccggccaccatctggcgcttcggcaccgtgaacgtgagctccgggttcaggatggcgaacttgggatacgcctcggggccgaacacgtgcccgatcttgagcttctgcccacggttggtgatgaccgcgccgccgttcatctcgctgcccgtgcccgccatggtgagcacgcagcccacggggacgacgtcgcattccacttcctcgaagcgcaggtagtagcgctcccacggatcctcgtcgcagtgcaccgaaacgctcacggccttcgcgtagtccgccaccgagccgccgcccacggccaagatgaagtcgacgcctttctcgcgcgccctgtcgcgaccctccagcagcctctccgccgtggggttcggcatgacgccgccatcgtccaccacggtcttgccgcactccttcagcagcgccaccacctggtcgtacagacccgtctccttgatggagccgccaccgtaggccagctggaccacggggccgaacgcaggcagctcgtcacgcagccgctcgagggcgtcgggtccgaaatgcaggcgggtggggttgtcgtaggtgaagtttccgagcatggctctctccttggtccgtgaggttcttcttggaccatcatgcaccttggagctcactctaagtcaagaagcatcttccggattgtcggaaaaccgtgactgcaccaccttccgtgccgccggaagaggcagcccgcgtaacggatggaaggcgcacggttcacaccgcgcagccgcccgctgcaccatttttcactgcggctatcgtatcgggctatgcgcaaggcaaccggaaaggagcaactatgatcgcaagggacgacaacaccgccgcgcgccccaccgccctggggcgcgggctcgacaccctcatgggcgaacgcgacgtacaagggggcaccgaaaagaaaagcgcccgcggaaccgacaacggacgtgcgcaagacgccggtgataccgaccgcacgcgggagaccgaccaggcagaagcctcttcgagcgtcggccattcggacggtgccgggttcaggcagcaagatggcgaacccagcccctcgcatccatccccgcacgggaacaattcgcagaacgcgcgcccgcaggcaagcggcatcgccgtcgtcagcgggctcatcgccggaggcgcggcaggcgccgtggccatcgccgcgttcgccctcctcggcgtgagggcggtgctgtcgatgcagcgccgcaaccgcctgttctaagcttgtcgggccgaccggcccgccgcatcagtgtcaaccggtcaggccgtacctctgcgccagctgggccgccttcacgcgggcgcccttctcgttgagggcccagcgctcgaacagcaccgcgttcccgctcgtgaacacgtcgtagatgccctcgaatgccatctcggcgcacgtgaaggcgccctcgatggacgtgaagtacgttgccgcgtcttcattgaaggcaccgtcttcgaactccaggacgtgcgcctgcttcccatggccggccaggggtacgagcatggtgccaccggagagcacaacgggcatcccgcggccgccgaacggcacgcgcgccgacgcgcgcaccgggtcgaaccgcccgacccactgcttgccgtccagtttcgcccaagcggctcaagcgcgcgtgaaacgcaggtcgtcgtcgcggtagagcgcctcgaagaactcgcggtacgtcgacgcaccgtccaagtgccctcgaaactcgggccgtaccccgcccccaagggaaacgagcgagagcacgcgagcgcatccccggcgctgccgctcgcccaaaccgtcgatctgctccttcaattccccgtactccatagctgcccctttcccccgaatacgcgcagcgcgcccctaggcggcgtgcgcctcgcgcaccagtatagcgcccgaacgcacgtgcggcagcccttccgaagaagaaccccctccgaccggcaggtcgaagggggttcggcaagcccgttcccgagccgcggcaagcggacggcctaccctcgggcctaagaggccgggtggttcggacctcagcgcatcggcggctgctggtacggcggctgtccgcccccgccggacccgcccgcagcacctgccagctcgaacggcatcggatcgtcctgcccgcgccacgccggcacgttgaactgctgcgtccagtagcccagcgcccgcgtgatcatcgccgtgaagaacacggccaccaccatggacgcgaatcccgccagcagcgagagcgcgatcgccacgccgccaaccccgaacaccatgccgacgatagccgcatcgaaacggctggagttgatgttcaggttgccgcccgtgaccgcgaaccctatggccatgcacaggaataccaccaccacgatgaggatggtcaccaccacggtcgtcgcaatggccatcagcacggccatgcccaggatgcgcagcatcccggcgaagtcatggcgcagcatgctccagatcttgccgaactggaatccggccgaaagccggccgtagatgctcatgcgcatggagcccacccaggtgaagaacgccgtgaacaggtacgccgcaatggacagggcgaagaacaccatgccgacaaggcctgaggcaaggcccagcggaaacgacaggaacccggaatgatagccccagcccgaccatatcccgaaggagcctccggtcaggatagaccccaccaattccaccgcccagggaatgagcgagcacacgaagcttataacgagcacgaagaacccgcgactgtacagccgcccgtcctcgttgccgaacacatgggcgggcagcggcgcatgcacgccccacgcgatgtcgcgcgcccagccgtacaggtagcccgccaccacgatccacccgaagatgggaacaaggctcaccaggcccagcaccagcagcttgccgaaccagccgggcgaattctttatatcatgccaagcagcattgaagtaaccggcctgcatagcgcccctcctatcctcatcagctgcgctaatgcgcagtctgtcagttagcgcgttctactataaacgcgcgcgccctaagcgcgtgcgaaccgttgccattccgtcagtaaggcgaaaccatcttaagcgcgacgacccgccgcacgtaacgcgcatcccgccagacagtaagagacccccaggtctgggggtctctcttcaagcagtctcgatggccgtcaggccgccggaaccaatttacttgagggtgacggccgcgccggcttcctcgagcttggccttgatctcctcggccttgtccttggcaacgccctcctggatcggcttcggggcgccctcgaccagctccttggcctccttcaggcccaggctcgtgatctcgcggacaaccttgatgacggcgatcttgttgtcgccgaagccctcgagcacgacgtcgaagtcggtcttctcctcggcagcagcgccaccctcggcaggagcggcagcagccacggccacgggggcggcggcggaaacgccaaacgtctcctcgatgtccttcaccagttcagaagcctcgagcagggacatctccttgagggcctcgatgatctcttcacgcgtaacagccatgttcgtttcctttcaaagcggccgggtccttcccgaccggtgtgttttgcctatcgtcaggcagcgctcgccgcgccgcctacgctgcggttaagcagcttccttctggtcggccacggccttcgtgacctgcgccagaccactcggcacgccgttgagcgccacggcaaggccgcgggcaacaccggagatagcgccggcgatctgagccaggagctcttcgcgggacgggagagaagcgatagcctccacctgtgcggcggaaacctgctcgccttccatcaagccacccttgatctccaggttctggttcgtcttcgcgaacgtcttcacggcctttgcggcagcagccacatcgtcaccggcgaacacgaacgcgctcggaccctccaggatatcgtcgagcgtgggcaggccggcctcgtccagggcaatgtgcatcagggtgttcttgtacaccttcatgctggcaccggattcgcggatggccacgcgcaacgcctggatgtccttcaccgtcaggccgcagtagtccacgacccacacagcggaaacgccgtcgagatcctccttgatcttggaaagcgtctcttggttcttcacgttgggcatgtagtacacctccttttcctcgaactcgggttccgctccctcgtctgggatcgtcgcctaagaaaaaggaacgacccccgccgtctcatgacagcaggggtcgtctaagcgcgaaacttatacaaccacctcggcgggccgcatccctgcgattaaacctctcggtaccagctgtcttgggcagcggaactagctatacgtcgtgctcccgaagaagcaaccgttatattctgccatcattccgccatttgtcaacccaaaacacggaaaagcccgccctctggcgcgctcaccgagcaccgtgctccccaggccatcgatcgccttcccgctcgaaaaccacgggaacccccgatcgcgggggttcccgagcaagcattctgccgtcgaaacgctacgccgcgtcgcccttcgcgtcggcggtggcatcggcctccttctccgcctccttcgcagcatcggccccgttaccggtcttcgcgccgtcggcgccgacaatctcctccacagggttcgtcggctccgcctccacgtaggtgaacgtgatggcgtccccttccttgtaccccacgatctctatcagcccgggaagcgcgaagtcgtagatggcgctgccgtcgtccagcttcacatagaagtgcgagttaccctccaccaccgcctgggcgatgtgggcaatcgtgccctgcttctcagccgcgcccgtgtccacgcccgactcggccagcacgccgttcgtggcgagcagggcctggtaggccttctggcactcggccaccgtgttgcccacggccacgttctggtagcgctggatgtccagcatggcgaactgcttgacgagtcccgcgttgtccttcagcgccatgaagtacgtcggctggcccgacacgttgatgagcagcgggaacgtggcctggtaacgcaggttctgcacctggccctcggccgactgcatggccgactcctcggtggcgccggccaccgggtagaagtgcgactcggccgtgcgctggttgatcagcacgaagcctacgatagagttgtcggccgtggccgaggtcacgcccgtgtacacccatacgtcatcgtccttggcaatgtagttgtagcccaggttgccatcggtgcccggcgtggtctgcaccacgttcttctgcccgaacacggagttcagccagccgtccttgtacttgccggaccagttgtactgctccagcagcagatcggtcgggtaggcgtggtcgacccactgcggcacgtccccgatggccaggtcctgcgtctcgcctgtcgtggcgtccaccatgaccacgcgctcgatggtcgtgccgccgaacaggccgatggtacgcgactgcaccgggcagatccaccagggatgcccctcgtcgtcgatctcgaacgacttctggtcgaacatgtagaacgggtagctcagctgcacgtggcggtcgatgttgcgcacgagcggctcggactcggagtaatggatgggattgtcttcaaggcgcacgatctccgcatcctgcgtcgtcatgttcaccagcgcgtaggcggggatgccggcctcgcggttcgtgaaccatttgaacaggtccgcgtatcccagcgggctcacgcgcaccggcgagctctggtagttgatctggctgtacagcggcgatatctcgaactggctcacgtactcgggaatggagcccatctcgcggttgcccagcagcacggccgagtcgcggtcgataacggggatctccgagtagttcacctccttgatatcctgcgcgaagttgtcctccgtcgtctgcagcaccgtggcgtacttctcggcgttgccggggaagatggagagcgacatcacggcaccaagcacgcccagcacggccacggccaccggcacgtagctcgcgaacttgaacgccttcgctttgcccgggttcgcctcgaccttcgcggtgccctccttgtagctgtgcgagcggctccagaacaccaggaacagcggcagcaggatgaacacggccacgaacatccaggtgtccgtcgaatggatgttgatgggcgggtggaaccaccagtaggcggccaggcctaccagcacgatcacgatggcggcgatgataagggccttcttgccccatgcggccatacggtccgcgaacggcacctcgacgtgaacgtgcggcggctgcgagcctccgccgcctcccctgccggcgcggcccgcgccgtccgaaggagcctctgcgtcagcgtcgaagcgcccgtccacgttgacccctgattgcctgagcgcttcaagcagcgcatcgattccggatgtctgtttcacggcatccctttctatatccctcgattgctagaatcaacatttcattatacggcaaagcgcccgtttgctcatcgcaaccgggcgccaccgttacctcgtctttacaataggcttcgcagcacgtacggcaaaataccgccatgctcgtagtaggcgccctctgtgggcgtgtccacgcgcacggtcgccttgaacgctgctgtcgagccgtcggcccgctcggcctccacgtccacttcgcgcggctcgggcagccccgccgagaagtcgatcggcgccaccgtgtagcgctcggagccgtcgagccccaggctctcggcgctctccccctccgcgaactgcagcggcaggatgcccatgccgatgaggttcgaccggtggatgcgctcgaagctctcggcgaacgccgcgcggatacccagaagcgccgggcccttcgctgcccagtcgcgcgacgatccgctgccgtacatcttgccggccaccaccacgagcggcacgcctgcagccttgaaatccatagccgcatcgaacagcgggcgcacctcgtctgccaggaaatcgcgcgtccagccacccttctttccctcggccagcttgttctgcagcttcacgttagcgaacgtgccgcgcatcatcacctcgtggttgccgcgccgggcaccatacgtgttgaagtctgccgggaccaccccatgctcctcgaggtagtgcgctgccggcgagtccgccgcgatcgagcctgccggcgagatatgatcggtggtgatgaagtcgccgagcagtgcgagcgcccgggcgcccacgatgggctcgggtgccgatggctcgcgccgcatgccgtcgaagtaaggggcgcggcgcacataggtagacgcgtcctcccaagcaaaggtgtcgctcggctcgctgccgagcgcctgccaagccgcgtcaccgtcgtacagcccgcgcgcgccgtcctcgtacagagcacggttcacgcaatccgccaccaacgcgtcgatctcctcgtcgctcggccagatgtcggccagtcgcaccggcgtgccgtcctcacggcaccccagcgcgtcatgcgccagatcaacgtccatcgtgcccgccagcgcataggcaacgaccatggccggggcggccaggtagttctgcgacacgtcgggcgagatgcgcccctcgaagttgcggttgccggaaagcacgctcgccagctcgatgtcgtcggccacgtcgtgcagcgccggcaagataggccccgagttgccgatgcagctcatgcatccgaatccgcaggtgtagaagcccagcgcccgcaggccctccatgagcccggcgcgctcgaggagaagctcggtggccttgctgcccggggcgaggaccgtcttcacccacggcttgggcgcaagccccgcctcggcggccttcttggccaccaggccgcacgccagcatcatgcgcggatcggtggccgtcgtgcagctggtcacggccgctatggcaagcgcaccatgcgtgagcgcgtggacctcgcccgccagctccagctccacggttttgccgcggtcgagctcgcgctcatcgcacacggcgcggaaacgctcctgcacgccttccagcggaatgcgatcgtgcggcctcgaaggaccggcgagcgagcggccgacagagctcaggtccagctcgatcacctcggcgtacctacgtgccggtgcgtccggctcgttccagaatccctgcgctttcgcatacgcctccacaagcgccacctgctcctcgctacgcccggtcaggcgcaggtacgccagcgttgcatcgtccacggggaacagcgtgcaggtgctgccgtactccggcgtcatgttcgagatgcacgtgcgctgcgtggcgttcaggctggcaagacccggcccgaagcactccacgaacgagcccaccacgcctttctcgcgcagcatctgggcgaacgtcagcgccacgtccatggccgccacgccctcggcgagctctcccgtcaggcgcacgcccaccacgcgcggcacgagcgtcgtgatgggctggccgagcgccgcagcctcggcctcgatgccgcccacgccccaaccgagcacgccgatgccgttcgccgtgggcgtatggctgtcggttcccacgagcgtgtcgaagtacgccaccgggcgctcgccgtccgcgcgcgccacccccgcgtcatccgacgtcatgactacgtgcgcgaactgctcgatgttcagctgatggcagatgcccgcccccggtggaacgatgcgcacgttgtcgaagctctgctgcgaccatttcaggaagtcgtagcgttccttgttgcgcgcgaactccagctccatgttctgctccagcgcgcccgcacagccggccgcgtccgcgatgaccgagtggtcgatcaccaaatcgcaggggatctgcgggttgatcttcgccggatcgccccccagctcggcgcacgcctcgcgcatgaccgcgaagtccacgaacaccggcacgcccgtgaagtcctggaacagcacgcgcgccggcgagaactccacctcgcttcccacctcgcccgcattgcctgccgccacgatacgcccggccagctcctcggcttcctccgggctctcggcgttgcgcagggcgttctccagcagcaccgtcagagcatagggaagcgtctccgagccaggaatgcccgccaccggatagtaggtgtagattgtaccgcccgcttcgagcgtgtcggcaaaacggctggtctcgtcagtcatgcatgactccaatccgccgccccaaggcggccctcgcgcgcgaaggccggctcccgcccgtcccgtcgcgcctccctctcttactcgcccgccaaagacggcgtcatatgccttctgcgccatgagcttatcacactgcgcatggcaccgataatctccgcgccactgccagcccttggatgggtggcgcagtacaccgcgccctgctttcctgatgtcaccccttacatggggaacggagaagacgcggaaagcggcggttaagaaccgctagaagataaggaaagataaaggctagccagcctgcacgttctcgacgatctgctgagcacggcgcttgagagcccctttgccgttctccgcgtcgaacttcatacgatcccgcaactcttccttcacctgcaaagcaagcttgccggccgagaagtcaaccaccgccacgagcatgtcttggaactccaggtcgccatgccagcattgtatggcctcgtcgacaagcggccagactttctcggaacggttctccgtcgtggcgcccagcttgcataggaagcgcatcgcggcaaggcgcaccgggccgctctcctcgtcgaacaacgcagcctcggcacccggcacggccttgtcgcacgtgcgcgagtcgcaatccaccaatgcggtaaggatatcaaggcattcccagcgcgtttgcgcttcgggacggttaagcgcatcgacgaacgccgatccatggggaacgagcatttcgggcgcctctttggcgacgatggcaagagccgatgcggcgttctgacgggcgcgtcgcgatcctcccgacagagcctccgtcaattcgccgagcttggcctcgtcgcgtatcgcggatgcggccaccttcgctgcctcttgcgccttgtcgctcaccagacgttcctccatcctcgttatcaaaagcacgcaaacaccatgcctagcatttcattataccctcgccccggcgaaccccgcctcccccgcgcagaataaacacgacccggaacgcgaacaagcccccgccccctagaggaccccccccccaacgcgagcaggccccccgggccgtgtcggtccggggggcctgcagaatgcaaaagcatcctccgcgagcgcgacgccctatcctcccacggactgactccgcagtactttcggcgatggcgggcttaacttccgagttcggaatgggatcgggtgatccccgcctccatggtcgcgctcgcgggggatgctcccgcgggcattgtctgccccgcccaggcggcaccgcgccaccctggcggtcgcatagcgcagcatcgaagtgatcgcggaacgcggacgttcctgcctgttgtgaagaagagctcgggctattagtagcgctcggctgagcacgttgccgtgcttgcacctgcgccctatcgaccaggtggtctacctgggcccttaccgaagagaagactcatcttggaggcggcttcccacttagatgctttcagcggttatccgtgccggacgtagctaggcggcggtgccgttggtcgacaaccgctccaccagaggtccgtccaccccggtcctctcgtactaggggcagatctcctcaatcttcttgcgcctgcggaggatagggaccgaactgtctcacgacgttctgaacccagctcgcgtaccgctttaaacggcgaacagccgtacccttgggaccgacttcagccccaggatgcgatgagccgacatcgaggtgccaaaccttgccgtcgatgtggactcttgggcaagatcagcctgttatccccggagtaccttttatccgttgagcgacggccattccactctgggccgccggatcactagaacctgctttcgcacctgctcgggttgtggccctcgcagtcaagcccgcttgcactcttgcgctctcgggacggttgccgaccgtcctgagcggacctttgcgcgcctccgttacattttgggaggcgaccgccccagtcaaactacccgcctgacacggtccccgtgccggatcacggccacgggttaggtcgccgacacgacgagggcagtattccaaggccggctccacgggaactggcgtccccgcttcgaagcctcctgcctatcctctacgcgccgagccaacgaccaatgtcaagctgcagtaaaggttcacggggtctttccgtccttccgcaggtaattcgcatcttcacgaataatacaatttcaccgggtccatggttgagacagcgcccaaatcgttacgccattcgtgcaggtcggaacttacccgacaaggaatttcgctaccttaggaccgttatagttacggccgccgtttaccggggcttggcttcagagcttcgcgtttccgctaacccatccgcgtaaccttccggcaccgggcaggcgtcagaccctatacgtcgccttgcggcttagcagagtcctgtgtttttgataaacagtcgcttgggccgtttcgctgcggcccctccccgctccggccgcgagggccttcaccggaaagggcgctccttctcccgaagttacggagccagtatgccgagttccttaaccatggttctcccgatcgcctcggtatgttctacccgcctacctgtgtcggttttggtacgggcgccgacaaagctccctagaggtttttctcggaagcatgggctcgccgacttcgcctgatggcttcgtctcgcgtctcggggcatgtggctcgctgatttccatgcgagcccccctacgcgctttcacggggacgtccagaaccccgcccggctacccttctccgtcaccccgtcggtcaaacgctcgtcagcggtacgggaatgtcgacccgttgtgcatcggctacgccttccggcctcgccttagctcccgactgaccctgggaggattagccttgcccaggaacccttaggcttacggcggaggggtttctcgcccctctctcgttactcatgccagcattctcactcccatgcggtccaccgaaggtcgcccttcggcttcgccccccatgggaagctcccctaccactgatagatcagtccgccgcttcggtgtcatgcttagccccgtgaattgtcggcgcatgtccacttgaccagtgagctgttacgcactctttaaatgcatggctgcttctaagccaacatcctggttgtctaggcaaacgcacatcctttgccactcagcatgaacttggggaccttagcgggcggtctgggctgtttccctctcgagcacacagcttagcccacatgctctgactcccggtctcttaagtcgcggtattcggagtttggttcttttcggtaggcggtgaagccccctagaagatccagtgctctacctccgcgactgaacgaccgaggctagccctaaagctatttcggggagaacgagatatctccgggtttgattggcctttcacccctatccacgggtcatcccctccgttttcaaccgaagtgggttcggccctccacggggtcttacccccgcttcagcctgcccatggatagctcacccggcttcgcgtctgcggcaagcgactctatcgccatcttaaaggctcgctttcactgcggctcggttccaaccttaacctcgccgcttaccgcaactcgctggctcattctacaaaaggcacgccgtcacactgcaggagtgctccgactgcttgtaggcgcacggtttcaggtactgtttcactcccctctcggggtgcttttcacctttccctcacggtactggttcgctatcggtcacaggagagtattcagccttggagggtggtccccccggattcataccgggtttcacgtgcccggcactactcgggtgccttcctcggaggcgtcggggtttcgcgtacggggctcttacccgctgcggccggcctttccatgccgttccgctaccgcgacgctttgtaactccgtcccaggtctgaggccctgggaggggaaggtcccacaacaccgcatgcagcaacgccctcaagcttgcacgtgcatgggtttgggctggtgcgctttcgctcgccgctactcgcgcaatctcggttgatttctgttcctccgggtacttagatgtttcagttccccgggttgcctcctccgagcctatttgattcagctcggggtagcagggcatgacccctgctgggttcccccattcggaaacctgcggatcgaagggtgtttgcccctccccgcagactatcgcggcttgccgcgtccttcatcggcttcctgtgccaaggcatccgccgtgcgcccttgacatcttcttcttacaaggtaattcaggtatccatatcgttcttgttcgcgatcgttcagatgcgaatcattcgactaatcgatgattctcaaatttcgatgctttcgctatgcaactgtcaaggtgcgcgggcgccctcgggcgcctcgagggcgggagccctcgaaaccgggtattgcgagcgacgaccgaaagggcccttgaatcaataggttttaaaatcttcttccaggccatgggagctgaagctcgaccatgtccggacacttgcgtgtctccctagaaaggaggtgatccagccgcaccttccggtacggctaccttgttacgacttcaccccccttaccctccacaccttcgacgcctccgccccttgcgggttcggccggcggcttcgggtgcagacgactcgggtggtgtgacgggcggtgtgtacaaggcccgggaacgtattcaccgcggcatgctgatccgcgattactagcaactccgacttcacggaggcgggttgcagcctccgatccgaactggggccggctttgagggattcgcttcctgtcgccaggtcgcggcccgttgtaccggccattgtagcacgtgtgcagcccagggcataaagggcatgatgacttgacgtcgtccccaccttcctccggcttgacgccggcagtcccatatgagtccccaactgaatgctggcaacatatggcaggggttgcgctcgttgcgggacttaacccaacatctcacgacacgagctgacgacagccatgcaccacctgcgctggctcctctcggccaccgggtttccccggcttcaccagcatgtcaagccctggtaaggttcttcgcgttgcttcgaattaagccacatgctccgctgcttgtgcgggcccccgtcaattcctttgagttttagccttgcggccgtactccccaggcggggcgcttaatgcgttggctgcggcacggagggatgatccccccacacctagcgcccatcgtttacggctgggactaccagggtatctaatcctgttcgctcccccagctttcgcgcctcagcgtcagtcgcggcccagaagactgccttcgccatcggtgttcttcccgatatctgcgcattccaccgctacaccgggaattccatcttcctctaccagactcgaggcttccagttcggaacccggccgggggttgagccctcgggttagaggttccgcttagaagcccgcctacgcgcgctttacgcccaatgaatccggataacgctcgccccctacgtattaccgcggctgctggcacgtagttagccggggcttcttctgcaggtaccgtcaacttcttccctgctgaaagcggtttacaacccgaaggccttcgtcccgcacgcggcgttgctgcgtcagggttccccccattgcgcaaaattccccactgctgcctcccgtaggagtctgggccgtatcttagtcccaatgtggccggtcggtctctcaacccggctacccatcgcaggcacggtgggccgttgccccgccgtctacctaatgggccgcgaccccatccccctccgtcggggctttcccgcccctcccatgcgggaggggcggagtatccggtattagcgcgggtttcctcgcgttatcccggggaggggggcaggttggtcacgtgttactcacccgttcgccactctattcgcgcccgaaggcgccttaatcgttcgacttgcatgtgttaggcacgccgccagcgttcatcctgagccaggatcaaactctccgtttgaagagtgcggcatcgctgccgcgttcgatcttggttttcgccggctcccccggcccttcggtgggctgggctcgcctggcgggcatctctcgattcgattcatctcgcaatatccggttttcaaggttcccgcctccccttccggggggcctcgccgcctcccttccgggcgagcggcgcaaggagatactttaccttcccgttgccatcctgtcaaggacttttttcaggaactttcgaagattttcgagatgccgttgaaacggactcgcaatcttcgtgctcctaaaagctctcttcagaaggaacgacccacgctctcctcaagcgcgggttttgtataataccggtaagctattaccaacgcaatgggaaaatgcaagtttttgaaaacttttcgacaccttttggtaaaacgcctgatgaagcactattaagcttcaagcttatcgtggatggcgccacatatccttcaaacttgcgcttattcggcgtggtgacccttgcccgaagcgccctttccctggcctaccccctgcccgtggccgttgccagaggggccgtcgtgaccggatccccagcctgcgccgccttgctggccgccctccccctctggctcgccgccttcgagggcggcgatacggctgcgcagctcatgcatgctcatggaggcacagtcttcgagcgtcaagctgctgtccagctccagcaggcggagtgccgcctgatagcggcctgcacccatgccggcagccgaagcggccgcgcgcgtctccgcgtcaaccgtatgacaggagccctcgcaaggcaggctgcgcaggcaggcgtcgctttgcgtgcgcagcgtgtcggactggcctgcatcgttggaagccacgcttatcgcaatgtaggcatcgctttccaggtaaggcgcgaaggcggtgctcgaggtgagcgttgccacggcgctgtcgtagggctttcccgtaaccgatacgtcacggagcagagcctcgccgtcctcgttgtaggccttcgccgagacaacgatgtcaaagcggttgatgccaagctcgatagacggattcacatcgatgcccacgaatgccgtctcctcgaagtacaggcgggagcctatgaggcccacggccgtcagcgccaagcacgctgcaagggcgatggcggcacggcgccacttcacaatgcgcggcgcagggggcttcgaaggcaaagcttccctgggctgtaccagatcgtcgatggcggcaagcgtgcgcgccctcacttcgggaggaagcgacacctcatcgaaggcctcgcgaacgcgttgctccaaatcgttcatgagagggcctccttcagaagcatcttgccacgtgcaatccacgagtacacggtgttgacgggcgcgtcgaccatcgtcgcgatttccggggcggtgtagccttcatagagagaaaggtagaggggcgtgcgcggcgggtcggtcagtccgcgcagggcgtccacgacctcgctcgaaaacgatgcgggctgcatcgcctcgtcgcaggacacgagcttgtcgccgcaggcgccttcgtcaaggggaacgttcgcgcggctggatgccttgagcatgtccttgcaggtgttggcagccacgcgaatgagccaggccttgcgatgctcgtcgtcgttgaacgagacggtgtcggcaagggcgtatttgaccatggtgtcctggaacgcatcctgggcatcggccgaagcacgaaagtagaggacgcacacacgccacaccgtggagccgtgagcgtccatcgcctgctctatgtcctcgtgcggcctcatgccctgcccggtgcgacgacggcgctagcagccgcggccgtgatggccgcggcccgcgccggccccctggccgtgaccgtggccggcgccgttgcccgggcaggtgcctgcctcgtagttgtcgcacgtgccgttgccgtccgcatcgacgtagccggcaccctggccacagccgttgccttgaccggcgcacgcgccgctggcgtagttgtcgcagacaccgtcgttgtcggcgtcgacatagccgcgatggtgtccgccctgcgcgcacgtgccggctgcgtagttgtcgcaaacgccatcgttatcggcatcgacatagcccggacacgcgggcgcggcggtcgatgccgcctcgacggccttctgcgccgccggcgccgaatcggcaatcccccgcacgacgacaggctccgtcgtcgtggcgccgccctgggcgctggcgaaggcgatggtgggcacggcggcaactgccagcaacgcgacaagggcgatggcgacggttctcttcttcatgcttcggtcctcctggttggttcggttcgcttcttccttcaccgctaacacgagcgggcgaggcgaatccttgcaacgttttccaaattctttcccttgatgcgaaaaagcccgccccgccaagggcggaacgggccttcgtcggcagatttcctagaccaggcgcacgaacttgcgcttgcctacctggagcgtggcacccgccagcatcgccgggtccacgttgtaggacttggcgggaacgggctcgccgttcaccttcacgccgccgccgtcgatgaggcgccgggcctcgccggcgctggcggccaggcccgcatcggcgaggagcttggccaggtagacggtgccctcgtcgttgggggcgaggtcggccgcgaactcggggatgtcgtcgggcacggcgtgctgcttgaacacgaggtcgaactgctcctcggccgcctgcgccgcggcctcgtcgtagtaggccgccacgatgttgcgcgccagcgcgcgcttcaccttgttgggatgcagctcgtcggctgccaggccgcgctcgatctcgtcgatctcgcccaccggcagcgcggaggccaggcggtagtacttcaccatgagctcgtcggggatggacatgaccttgccgaacatgtcggccggctcgtcggtgaggccgatgtagttgccgtagctcttggacatcttctgtacgccgtcggtgccttcgagcaggggcagcgtcaggcacacctgcggctccatgcccatcttctccatgagctcgcggccggccagcaggttgaacagctggtcggtgccgccgagctccacgtcggcctcgatgaccaccgagtcgtaggcctgcatgagcgggtaaaggaactcgtgcaggctgatggactggttcgacgtgtagcggttgtggaagtcgtcgcgctcgaggatgcgggccaccgtgaagttgctggccagcttcaagaggccctccatgttgagggacagcagccactcggagttgtagcgcagcgtggtcttctcgggatcgaggatcttgaaggcttggtccacataggtttgagcgttggccttgatctgctctgacgtgagctgcgggcgcgtggagttacggcccgacgggtcgccgatgagcgcggtgccgtcgccgatgatgagcgtgacgccatggccgagatcctggaactggcggagcttccgcagtggcacggcatgcccgaggtggatgtcgggtgccgtggggtccacgcccagcttgatgttgaggggcttgccgcgcttgagcttctcgagcagcgcgctttccggcacgatctgcgccgcgccggaggcgatggtgtgcagttgttcttcagcggatagcatcgatctctctccttactatatatagtgttggagattctagcacatcggtggtcgacaaggggcgtttcacatgcccgggattgcggggccggcttgcgggggtgacattatccccgtccctctgtcaccccctgatcgtggtgcttcccccttacgaaacccctcggtagaggtggccgctggtggtgccgggagtcttggcgagcgcattgccgtcgcgctgggccacgtcgcgggcgcggacggcgcgggccacggcggcggccgtctcctcgacgttcatgagcgtggcatccaccatgagccccgagaggccggttgcaatgaggtcggggaccacctgggccacgtcgagcaccacgccgttgtacacgtggctgcgtcccagcgcatcggtgacgacggggaactcgtagtccttgcggtccttgaggtagtgcgggctcttgcggcgcgcgcactcgtcgcatcgctcgttgcacggtccctggctcatgagcaggcagtgctcgcacaccatgagctcctgcgcccccatgatggtcaggccgagcgcgacgggcgcgttctcggctaggtcggccacctggccgagcgtgagctcgggcgagagccacacgcgctcgaccccccagtcggccatcgtttcgagcgagaggcggttcacaagcggcagatgcgggcccgcctccacgacggcgcccagctcggcggcgcgctgcaccgcgcccaggctctctgcgagcacgggcttcccgggcttcacgtagcgccaggggtcgaagccgagcagatcctcgcgggtgccggccaccgggtcatggtcgaccacgggcagcgccgtgacgcactgcttcgggtagccggcctgctctgccgtgcccgtgcgctggccggcgatgaccgcctcgccgcgcttgtagttgagggccggaacgtagaccgtatcggcgccggcgcgcttggcggcgcgcgcgcaggcggggttcgtcacccatgcggcaaccgtgcagccccggcgctcggccggaacccggcggggccgctcctgcacgcgcggcagagcgcggttgcgatagggggccaacaggctcgcgcttaggttgtcgagcgcgtcggcgcgcacgcggtgcagctgggagaagccgatgcccacgttctcatcgaggtcgatatcgagcgcgtcgagctggaacggcgtctgcccgagccggtcgatatgcgcccggacgtccgtcgcggccacggccttcgtacgcgccgcctccacgacgtcgccctccgccacgccgatggcgccggcgacatcggcctccgcgccggcgagccgaaactcgatgcgcagcggctcgccgatgcgcagccgcgccgaaccgaccacgcgcacgcgcggcgccaacgggtcgtcggcgaagccggtggcggcgttgcgcacgcggaacacgcggtcgcccttgcccaccgcccgctgcggagccgtgcacacgttgcccgccttgtcggcctcgagagggccgagcgtgtgggcgaagtgacccttgttcgtccagaattccagcacgtcgccctcgtgcagctcctcctcggcggcgatggccgccaccccgtcgcgcgcgtaggccacgcggcccacgaaggcgccgcggttgttggggcgcccgtagctcatgatgtcgttgccgcgttggcctgtcaggtacgccgtggtgaatccacgtgagaacgcctcctcgagcgcgcggcgctcatcgccggtggcgcgcacggggccattctccgccgcctcgcccatcgcatgcgcggccagcacgcggtcgagcaccgcccggtaggcggacgtcaccgcgaacacgtagtcggcggacttcatgcgcccctctatcttgagcgaggcggcaccggctgccaccagctcgggcatgaggtcgatggcgcagagatcctgcggcgagagcaggtgctcgcccggcgacggcagctccttgcgctgtgcgcggttgcgcagctcgtagggaagccggcacgcctgggcgcacaggccccggttcgccgagcggccgccgatcatcgaggacatgaagcactggcccgaatagcacacgcacagggcgccgtgggcgaacgcctcgacttccagaccgaggccggacgcaacgccggccaggtgctcaacttctgccagggacagctcgcgcgcgagcgtcacgcggcgcgcgcccagcttggcggccgcctcgatgccggctgcgttgtgggtgttcatctgcgtggagatatgcaggcgcgcctggggaagcgaccgggcgagctcggcggccacgcccacgtcctgcacgatgaaggcatcggcgccggcccggtacgcctgccgcgcgcactccagggcgcggtcgacctccgagggcaggatggcggtgttcagcgtcacgtacacgcgcacgccgcgcagatgcgcgtagtcgcaggcctcgccaagggtctcaagcgtgaagttgtcggcgttgcgccgtgcgttgaacgcgtccaatcccaggtagacggcatccgccccacctgccaccgccgcgtgcagcgcctctgcgccccccgccggggcaagcagttccacggacggcagcgccgcgccttgctggttcgacatagttgcttcctaactgcgtatctcatgcgaccgcacgtgcattatgcgtgcgagcagccgctttatgctcttttctgtgcgccggcccgcgttgtaacggttcggcaacggcagtatggtagtatagtcgaaccatgaaaatacggcgaaaacagcgcgaaacgcgcacccatgccgcgaaatggctcctgcttgtcgcagcagcggctttctgcttcgtggcgtatcaaggcgtccagggcgtacttcacgtcatagacgattggacgagcgacctccccagcctgtcgagcaccgacgcgttcaactacgcgcaggagtcgacgatgtacgcgggcgaccagagcacgcttctggccgagttccagcttgagaagcgcgacccgctcgcctcggccgaccaggtgagcccctacgtgctcaagggcacggtggacaccgaggacgtgcgcttctacgagcataccggcgtggaccttcccggcatcgcacgcgccgtgctcgtcaacctgggcggcggggcgctcgag

SEQ ID NO: 79 - DNA, 199278 bp, Gordonibacter urolithinfaciens
  source 1..199278: mol_type = genomic DNA
cgggccttccggcccgcgaaacccctgccgacgctgcggagccccctggcacccgagcttgtcacgatcccgtaggttcgcgtaccgcagtacgcttcacctccgcgatcctgccaatctcgggtgccagggggctcctcgctgacttactacgccaacctgggcggctgttatgcgccctccgggcgcatgggcgggtcgcttcgcttccgcccgccaacctgggcggttgttctcgcgcttcgcgcgaggcgcaggtcgcttcgcccctgcgcggaggctcctcggctgaccgctccttacgagcgcggctcgaacgggtcgcggggctcgtcgtcctcgccgcccatgatgcggcgcagctcctcgcggtccacgtggatacggtcgctcgggtcgctgggcgcggcgtcggtcggagctgcctgcgaggacgcgggtgcgtcgggtcgctcgtcgtcctcggtcccgcgcatctccaccggcggcaggggcgacgtgctgccgggcgcgcgccacagccagcgcaggcgctcgtaggcgcggcgccgctcgcgctcgcgctccaccttgcccttgggcgggcgcacgcgccgcgccaccgatttcaccgggcgggccacggcgctcgtcaccacgtccgtgtagtccttgggcggcgtggtcttccagccgaagaacagcgacgcgtagcgcagccccagcacgatggccacgcaggcgtagggcgcgtactggtccagcacgtggttctgcgccatgagcgcgtacaccgtggagccgatgagcgcggccgagccgtacatggcgccggcctggaacgcctccggctcgcggttcatgaacacgtcgcgcaggatgccgccgcccacggcggtcacggtgcccaggatgatggagggcacgacgtcgagcccggccgacaggcccttgcccacgctgatcacggcccacagcgctaccgagaggttgtccagcagcgccaccaccgggtccaggtacgtggccagcttgccgaagtagaacacgatgacgcctgctcccgcgcaagccagcagcagctctggtttctggaatgcgtagatgccgtagttctgcatgagcagatcgcgcatgatgccgcccgccaggccggcggtgagcgcgatgcacaccacgccgaagatgtcgtagcgggcgcgcacggcgctcatggcgcccgacaagccgcccgtcagcgcggcggccagctccagccagaacgggatggtgaggacgacttccagcatggcgcgctaggcgccgcggggggcgggggagttcgaggcggccgcgttgcggccagagggctccgttgcgttcgccgtctcgccctctgcgccgtgcgccgtgccgccgtcctccaccgacacgagcgtggccaccacgggtcggcccgagaagtccagctcgccggtcagggcgcgcgcggcccccaggtcgaagtcgtcgcggtcgaaggcgtcgatgttctcctcggccttctcgagcgcccggccgtacaggtcccagaagctcgccgtgctcacctcgcccgtgtacgggttctcccaggcctcgtgggcgcggttgtcgtagatgctctcggtgagcgccacgggacgatggctcatggactggtagaacgagtaagggcgcacgagcccctcgatgcgtcccagcagcgcacgcttggcgccggtcttggagtagaacagccgttgcacgcggcggaagttgcgcaccgaccgcgcgaacaggtcgcgcggcacgatgcgcccgtacaccgtgagcgctgcgtaggagtacatcttcgacaccgcgcccagcgcgaagtcgctggcctgcaggatctcgcgccacggctggaacgttgccaccgtctcgccgcgcttctcgaacagcacgagctcgtccagctcgctttcgatgacggcgtgcacctcatgggcgtcgtcgcgcgagaggcccggttcgccggcatcggtgagcaggtactcgtggaagaacacgagcgggtgcatggtggaatccagcgtgtagtggcacaggaagccgaacgcgtaggcgcgcccgacgggcagttcgtcgtcatcgaggatgccgagggagtctttgaatgccttgatgagctcgctcggcttctcgctgtgcatcacgttgcccaagcggttgtgctcgtgcaggcgcgggtcggccaccgcgtagaacagggggtccggaccttggttgcccagcaggaacgcctcggcctcgtcgcgggttccgccgacgttgcggaagatatggtcgtagacgtcttggccgaagaagtcgtgcgtgatgagagcgggcatggcgcggtaccccgtttctgacgtgaaatttacccgtgtcgcttagcgctatcatatacaatgaggcggtgcttgttaaccgtcggtttcccagttgtgaagaacgtttccggctgaacggcggtggcgaggcgcgcgggggcgcgcgggacgagaggaaggcgcaccatggcgcgagcgaagttgacgaggcaggaacgcagctgggttctgtacgacgtgggaaactcggcgttcgtgctgctggccacggcccttattccggtgtacttcgcctcgatcgccgaggaaggctcatcggtggtggtggcctggggctacgccgagacggtggcgtcgctcatcctggccctgctcatgcccgtcctgggcagcctcgccgatctcaagggcaacaagaagaagttcttcgtcggcacggtgggcacgggcgccatcgcgctggcggcccttggcattcccacggctgccatgacgttcctcgtgctgtatgtgatcgcgtccatcatgctgaacggctccatggtgttctacgacgcgttccttgtagatgccacctgcgacgagcgctacgacgaggtgtcgtcgcagggctacgcatggggttacatcggctcgtgcgtgccgttcatcgcatgcttggccgtggtgttgggtgggccgtctatcggcatccccatggatatcggtatgaagatagcgtttctcatcacggctgcgtggtgggtggcgtttagcatcccgctcattcgcgacgtgcaccagacgcactacaaggagcgcgccgagcacctgatccgcgacacgttcggcggcctgtggaagacggtgaagcgcatcttcaaggatcggcggctgcgcttgttcatgctggcgttcttctgctacatcgacggcgtgcacaccatcatcaagatgtccacgagctacggcaccgatctggggatcgatgcgacgcagctcgtgctggcgctgctggtgacgcagttcgtggcgttcccgtcggccatcgcctacgggcgattgtccggcaggttcggtacgaagcgcatgctgctcgtggccatcggcgcgtacttctgcatcacgctgttcgcggcgttcttcctgcgcgaggcgttcgagttctggatcctcgccatctgcgtgggcctgttccagggcggcatccaggcgctctcgcgcagcgagttcggcaagctcattcccaaggagcacgccaacgagtactacggcttcttcgacatcttcggcaagtacgccgccgtcatgggcacgtttctggtgagcgtgttcacgcagctcaccggcaactcgtccatgggcgtgctgtccattgccgtgctgttcgtggtgggcttcgtgctgctgtggcggatgccggagagggaatagggaggctgcggcgcgagcgcaccgtcggtcggggcggggcgcggatgccgctggccggcagctccgttatcgtcaaccgggaaagcaaggccttttgcccccgttttgtccaatggcacaaaacgggggcttgcgattgtcccgcttgtccaaaagagggcgggggcgtgcaggatatcctcttggtacgagaattcgatcgagaggagcatcccatgttggagaagttggacgagcgggccacgtcggccctgctctcgctggattctggagacttggcgtactgcctgaagctgacgaagcgcttcgagcaaatgggcgtgagcccccagcatgccagcaacgcgctctgcacgctggtggataacggcaacttggaagatctttaccaggctggatagacggtgcttaccttgcggagcgctggccggcctgcaaaatgccggccggcaacggtgcctgctggcgcatatggttggcgcgcggtcccgctgccgtcggggtgcatcgccctgcccgtaggacggcgcaccccgacggcagcgacgcatttggtgtagtatgggcccatcgtcgagaggggttcaggtgtgataaccgttgcggacatcatcgcgttgccggcgttcgagcgaatcgagctggcggctccgtgcgcgggggcgggtgcgcgcgaggtgcgcaacgtgggtattctggatctcgcaccagacgagcaggcgtatgccgattacctgccaggcgagttcatcgcgtcgaacctcggtttcgcacgcgacgatgcggcgcttgccgaggcttcgcttctcacgctcataaagagaaacgtggcggcggtggccgttaagaacgggcaccaccctcatctgagcgaggcggtgcgcgcggccagcacgtcggctggcgttccgctgtacctctacgacggagcctaccacgaggttctggcctatcaagcgctcgatctcattcgccgcgacggcgaggagtcggacaaggggcgtttggtggatgcgcttctggcagctcgcgatagccagggcacgcgcgccaagctctatcagctcaccggagccatgggcgccacgctgcagtgcctcgccgtggcgccgcgcaacgccgacgaatgctcgctgtacgccgcgctcgctgcgcttgcggaggtgctgcgcgcgttcaaggccgattgggccagcgtggacacggtgttcgcctgccgctaccacgacctcctgcttgcgttcgtgtcctatgcgcagcctccggcttccgttcgcgcggcttccgaggccgacttggtggcgcgcatccagggcatcggccctctgtggctcggggtgggggaggagggtcccttgtccgacggcgacctgagcgtgcgcgaggccctggccgcgctcaagaccgctcgcatcgaggccgatgcggtggtgtgctgggccgacctgcatcacgacgccttccgcgccgcggcggccgccagccgccttttcggccgcaccgccgcgtttcatcgcgctctgctggaggaatacgacgcggaaaacgatgccgagctggcccccacggccgaagccctcgcccgcgcctacggcgacgtgcgcgcggccgccgagcagctgcaccagcatcccaacaccgtgcgctaccgcctgcgcaaggcgaaggccgtcctcggcatgcccgacgccccggaccgcgagttcgccttcctgctgggccttatcttcctcgaccgcacgaatccgctgctcgggcgctgacgcccgacaggtcgggcgcatgcatccccaccggatagcatcttcgttcccagttccgcctttcgctttccccgtgaaaaaacgcctgctcgcgggtgttcggtgcgcgtggaggccggctctttggtatagtggagagccaactgggccaatgacgagaaagaacgccatgtcgctaatcgtagcaaaattcgggggaacctcagttgcctcgcctgaacgcatccagatggttgcgaagaaggtcatcgcgaagaagcaggccggccacgacgtggtggccgtggtgtccgccatgggcaagaccaccgacgagctggtgggcctcgcccgcgcactcaaccaagatccgcccgcccgcgagatggaccggctgctttccaccggcgagcaggtgtccatgacgcttctggccatggccatcgaggcgcgcggctacaagtccatgagcttcacgggccgccaggccggcatcgagaccgacggcatgcacgcgaaggccaagatcgtgaaggtgcacaacgagcgcatcatggaggccatcgccgccggcgccatccccgtggtggcaggtttccagggcatcgacgcgaacggcgacatcaccacgctcggccgcgggggctccgacacgacggccgtggccgttgcctggggcatcggcgcggacgtatgcgagatctactccgatgtggacggcgtgtacacggccgacccgcgcgtgtgcccgcgcgccaagaagctcgacgccgtgtcctacgacgacatgctggagctgtccggctcgggcgcgggcgtgctgcagatgcgcgccgtggagttcgcgcgcaagtacgacgtggtcatccattcccgctcggcgttctccgaggccgagggcacctacatcaaggaggaaaccgacatgatggaagaagccgtcatcaccggcatcgcgcacgacacgtccgaggtgaaggtgaccatccgcggcgtgcccgacatgacgggcgtggcggcgaaggtgttcagcgcgctggccgggaacaacgtgcgcgtggacatgatcatccagaacatctcggaggacggcttcacggacatcagcttcacgtgcgccggcgccgacctggcgctcgcacgcgagaccatcgagcgcatcctgcccgacatcagcgcccgcgagttcgacgtagacgaggatatcgcgaaggtgagcctcgtgggcacgggcatgaagtcgtcgcccggcgtggcggcgcgcgcgttcacgacgctgggggagaaccagatcaacatcctggccatctccacgtcgcccatccgtctgtccgtggtggtggacggctcgcaggccgccgaggccgtgcgctgcctgcacacggcgttcgacctggacagcgacagcgtattcgaggagacgcagctttccgccgaggagatcgccgcgaagatgaacaaggggaggtaggggaatgggcgatgcatccgtaaaggcattgtatatcatgctatgatggaaagggtcagcggacgtaagtcctgagcgtcgggcggcaccttcttttagaaaggaggtgattcgcttgggtgtcacgcttgcattcctacagcttgcagcttcggctgttgcgctggcgactgcggtcgtcgggctgctgcgggaggcgatggcgctcgccaaggcgctgatggcgcaccaaaaagatgaccgctagcaggaactagcggtcatgctcccttagcggtgccgcctggttcctacctcaggcagtccgctgacttctgcagtataaccgcaacgagggtgtttttgcaaacggttcggggcttgtgcagcaaaggagcaaaaaatggtttggacgaaggaaatgccggcgaatccggtggtggcggtggcgggagctacgggagccgtgggcagcgagttcctgaaggtgctgcacgacctggactttccggcgagcgaggtgcgggcgctggcgtcggcgcgttcggcgggcaggaagttgccgttcgcgggctgcgggcaggtgccggcgggcgagctcacggtgcaggagatgtgcccggagtcgttcgagggcgttgacatcgcgctgttcagctgcggcgcgggcgtgtcgaaggagctgcgcgaggccgtgacggccgccggcgcggtcatgatcgacaactcgagcgcgttccgcatggacgaggacgtgccgctggtggtgcccgaggtgaacccgggcgacgtggcctggcacaacggcgtcatcgcgaacccgaactgctccaccatccagatggtggtggcgctgaagccgctctacgacctctctcccatcacgcgcgtggtggtgtccacctaccaggcggccagcggcggcggcgcgccggccatggccgagctgtacgaccagaccaaggcgttcctcgacggcacgccggaggacgagctggaggtgaaggtgttccagcaccgcatcgcgttcaactgcatcccgcacatcgacgtgttcctggacgacgattccaccaaggaagagtggaagatggtcgtggagacgaagaagatcatgggcgaccagggcatcaaggtggccgccacctgcgtgcgcgtgcccgtgctgcgctgccatgcggagtcggtgaacgtggagttcgccggcgacgtgggcgtggaggccgcgcgggccgccctcgcggcgaccgacggcatcacggtcatggacgactgcgccacgaacacctatcccatgccgggcatcctggccggcaccgacgacacctacgtcggccgcctgcgccgcgacgacacggtggagcacgggctggccatgtgggtggtggccgaccagatccgcaagggcgccgcgctcaacgccgtgcagatcgcccagctgctgctgccgtagggcagcgctcgcctgcgtccgcccagcggagccggcccgccatgcggcccggctccgttcttcgcggaaccttcgcgccctggaggcgccttcaccgcttccgaacgcaccgcgcggggcggcgacgttcaacttaggctcgaatcgcacgcacgccgatcgcatgcagtcgtgttctgcgtgcgcggcgggctattttgcgctaccatatcaggcagatgccgtttggcgaaagacggggatttgacgcatacaccgagcaacgaacacggaaccttgccctcgcagggcaccgccttccgcgcggaagcgcccgccgagaccggctctgccttgccgctcacgcgccgccgcttcctggccgtgtcggctgtcggattggcgacggccttctcccccttcgcgcttcccggctgctccaccagcaagaacatagtcgtcggcgagacggccgacgtggaggtcgacacccggctcacgttcttcggcttcaagtacgagtccatcaacgtcatggccatcgaggacatcctgcgcgacttcatggatgcccatccgaacgtgtccgtgtcctacgagggtatcaagagcaggccttattacgaggcgcttgtgaagcgcctcgattccggcaccggcgacgacgtgttcatgatcgaccatgacacggcgctgtcgttcgagaagaagggctacctggccgacttggccggcctgcccaccatctccacgttcagcaggctggcctttgaccagatggatgccgagggcactatcctgtacgtgccgacgtccatctccgcgttcggcctgtactgcaacaccggcctgctggccgcgcacggcatcgacgcgccgcgcacgctggcggagttcgagcgcgcctgcgacgcgttcctcgccgaaggcgtcacgccgctcgtggcgaacaacgacatctcgctcaagacgctcgccatcgcgcggggcatggcggaggtgtacgccgccgacaacgtacgcgagcgcgtcgccgccctgagcgccgatcccgatgcgctggccgcgcagctgcgccccggcctggagctggtggagcgcatcgttaagcgcggctacgtggacgcgggcatggccctggaaacggagaagacctccgacgacctggaccagttcgccaccggcagctacccgttcatgctcacgggcgcctgggcctcggtgcgcgtgcacgacatggcgccggacctggcgtacgaggtgcatccctatccggtcctcgaagaccggcccgtgctcgtggtcaacgtcgacacgcgggtgagcgtgaacgcgaacggcgcccatgtcgaagaggccaaggggttcgcggccttcctcacccagccgtccgccatcgagcgcttcgcgaacagccagtgctcgttcagcccgctggagggcaacgccgcccccgacgacgcctcgctgcagccgctggccggggcgttcgccgcgggcgcggtcgtgggctcggacgacaacatcctcctgcccgtctggggcgcgctgcgccagagcgtggcgtccctgctcgaaggcgcgacggccgcccaagccgaggatcagctgcgcagcctgctggccgagggggcggatgcgtcctcatgaagtcgcgcaagacgctcatctcgatcctcgtggcggcggcgtccgtggccgtgatcgccggcacggtgctgttcgcgcgcttcgtgcaggactcgctgtgggagaagtccgtgaccgacgtgctggaggtgacggcgcaaggtcagcatgcgctcgacacgttcttcgagaaggacctggacacgctcgacttgttcgccgccgagctttccgtgcagcgccacgatgacgaggaccgcttgatcgagaagctggcgctgttcgggatggacgacgacggcacggtgtacgtgtgcgtcgacctgggcacgggcgcggtgtaccgcacggacaacgccaacgcggcgaggctcacggacgagcagatggcctcgaccgccgcggccgccgatcggggcgtgatggagccgtttttggacgagcgcacgggcggcaacatgataggcgtgtacgagcgcttcacgttctccgacggcacgccgggcatcgtgcgcaaggcgcgcccgctcggcgacgtggaggaacggttctcgctgtcgttctacaacgacagcggcttctcgtacgtggtgaacgacgagggcgaagtggtcatgcgctcgcagcaccgcgatagcaaccgcacgttctccagcatctacgacatcgtgggcttcgagggcaacgaccaggtggacgtggactcgttccgcgctgcgctcaagcagaacgcgcgcggcgtggcgctgttctcgtaccggggcgatgagtacgtgttctgctacacgccgctggagggcacggacggctgggacgtggtgtccatcatcccgaacgaagtggtcatggagcaggccaacgccatcatcaacgccacgcttcttttgtgcctggtcatcatcgtggggctgggcatcgtgctgacggtgtactggcgcggcagccgtgcgcaccgcagggagatcgagtgcatggcgttcttcgatggcctcaccgggctgttcagcgccgacaagttcgcgctggagggcgacgtgcggctggcggagcgcgcgagggccgacagggccggcgggggcgcagggggcggcatggccgcggcgtgcatcgacatagacaacttcaagctcatcaacgatgtggatgggtacgcgcggggcgacgaggtgctgcgggagctcgccgccatcctgcgcgaggaggcggggaaggacggcatcgcggcgcgcctgtcggccgactacttccagctgctggttccgtatgtgcgccgcgaggacgcgctggacgtttgcaagcgcatagccgagcgggcgcgcgacatcgtgggcaacgggaagccgcttgccctgcacatcggcctgtgctgctcggaggacgcgcccgaggcgcgcgacgcgaacgagctcaccgaccgcgcgcgcatcgcccaggtcgaatcgcgcaagcgcggcgagacgccgtgcgcctacagcaagcccatgcgcgacgcgctcctgcgccgggccgacctggagcgctcgatggagggcgcgctggagcacggcgagttcttccacctcgtgcagccgaagtacgacgtgacgggcacgcgcgtgctgggcggagaggcgctcgtgcgctggagccgtcccgacgagggcgtcgtgggccccgacgagttcatcccgctgttcgagcagaacggtttcatcctgaggctcgacgagttcgtgttcgagagcgtgtgccgcgacctgcgtgcacgcctggatgccgggctgcccgtggtgccgatctcggtgaacgtgtcccgcctgcacctgcaccgccccgacttcctgtccacgtacgtgcgcatcaaggacgagcacggcatccccgacgggctgtgcgagctggagctgacggagagcatcgtcatcgaggacctgcacggcatgttcgacatcatggacagcatgcgccgcgccgggttccgctgcgccatcgacgacttcggctcgggccagtcgtcgctcaacgtgctgaaggacctgcccgccgacgtgctgaagctcgaccgcgacttcctgctggagggatcgcttcccggcacggaggaaacggtggtgcgcacggtcatcaccatggccaaggagctgcgcatggacacggtcatggagggcgtggaaacgccgaagcagctggcgttcctgcgcacgacggcgtgcgacatggtgcagggcttcgtgttctcgcgccccgtgccccccgaggagttctaccggctgctggacacggtcgcaccggacgagggtgcgccccgagactgactgccgacaagcttccccgtgctcttcggcggtgaaagggtgctacttccgcagcatgcggtaaccgatgcccacatgggtttggaggtaggcggggtgggccgggtcgcgttcgatcttcttgcgcagggtggccatgaacacgcgcagcgacggcaggtcgctggccagggcgttgccccacacctccttcaggatggcgttgtgcgtgagcaccttgccggtgttgcgggccaaaagcgccagcagcttgtactcgatgggggtgagatgaacctcttcgccggcgagggtgacggtgcgggcggcgtagtcgatgcgcaggtcgccgttctcgtagacggggccgtcccggtcggcgccggcatccgccgccaagcgccgcgtggccacgcgcagccgcgccagcagctcctccaccgagaacggcttgatgaggtagtcgtcggcgccggcgtccagcgcggccaccttgtcggcgtcctcggtgcgtgcggacaccacgatgatgggggtgtgcgaccacgtgcgcacctggcggatgaggtcgatgccgtcggcgtctggcagccccaggtcgaggatgatcacgtcggggttcttcgtggtggcctccagcagggccgctcctcccgtgctcgcttcgagcaggcggtagccctgcaccttgagcgccgtggcgatgaggctcttcacggcgctgtcatcctccactatgaggatggtgaaggctccacggccttcggctgcgtcggtcatgcgcctcctccttcgtcgtccggggtgcgggtcgtctcgggcggcctcgcggcatccgctgcgggacggccctctgtcgcggccgtcgcacgttgctcggcctccgcgtggttcgcctcgtattctaccgcaggcagcgtgaacgtgatgacggtgcccggacggtcgggagaggtgcgctcgctcttggggagcgcgtcgacggcgatggtgcccccgtgtatctccacgatggacttgcacagggccaggccgaggcccatgccgcgtcgcgcatcgctgcccacgttcttccccttgtagaacatcgtgaatatctcggtgcggtcggccggctcgatgccggggccgtcatcggccacggacacagccacgagccccgcagtgcccgggcgctgcccgcggcctgcgcgccgcgccgatacggtgatgcgcgaaccttccggcgtgtaagtgacggcgttgttcaccaggttgatgatgacctgcatgataaggcgcccgtccatctgggccatgagcagcgggtcgtccacctgcacgcgcaattcgtgcagcgcggccttgcggttcaggtggtggaacgcctcgcggatcacgtcctccaccagctccggctcggttttgagcgccatggtgccgttgtccagccgcgtgaccaccagcaggttctccacgaggttcacgagccacagcgcatcctcgtagatgtcggtgtagatggcgcgcttcttgtcgtccgtgagcgcatcggcactcgacagcaaaatagacgcatcgccggagatgctggtgagcggcgtgcgtaggtcgtgcgagatgctgcgcagcaggttcgcgcgcaggctctcctgctcggcttgcaggcggatgcggtgcgcgtcctcggccgagcgctcgcgctccacggcctggccgcactcgtccagcatgaccagcagcaggttcttctcgaacgcgtccaggtcctcgtcggccagcacgataccggccacgcccaccacggtgtccttgccgcgtatgggcaggtagaggcaccgcgcgttcatgagcgtgcccgttcccgtgccggcgcgcttgttgttgccggccacccaggcggccacggcgcgctcgtcgtcgctcaccagcgacgtcatggtcacgtcctcgtcggggttgcccgaggagaacaggctggggtcgagcagccggccgctgggggatacctggtagatgacgacggtggtgcgcagcagcttgatgacctgctcggccgtggtggacaggatgctgtccacgccgttggcctcctgcaggcggtgttccgtttccagcagcacctcggtacgataggccttgcgggcgttcatctgggcctcgcggcgcgtgcggatggtgagcgacgacaccacggcggacgtgacgaacaaaaacgcgaacgtgaacgggtagttcagtccgtaggccgtcaaggtgaagcgcggcgtttggaagaagtagttgaacaggatgacggccagcggcgaggccacgatgctgtagaagaagctgtcggccttgagcgaacctagtagcaccgccacgaggtagacggccaggatggtgctgccggcgagcccggcctcgtggaacgcgagcccgagcaccgtggcgcccagcagggccaagaacgcggcggcgaagtcggtgcgcgtgggcttgaagcgcgtggccaggcgcgggccggacgtggggcgggcctcgtggcggtcggcgatgaccacgacgtcggccgtgcaggacagcttcgccaggcgacttcccacggactcgcgtgggaataggttgggcagtgcgcgcttgcgctggttctcggacgagccgatgacgattttcgagatggtgcccgagagcgcgtactgggcgatctggagagccagatcgccgccgtaaacagtcacgacgtgcgcgcccagctcctcggccagctccacgttcgcgtgcagcgcccgggcgtcttcctcggagagtttctggtcgtcgacgggctccatcaccagcgccgtgagcgtgccgcggtaggcggcggccaggcgcgccgcggcgcgaatgacggtggcgttgccggcggaggggctcacgtgcacgagcacgtcatcgccggcgtcgcccgctgcgcgccccagaccgcgctcgaggttgcggttcaggcggtcggccgtgcggcgcagcgccagttcgcgcaggtaggcgaggttcttctttgagaagaagttcgcgagcgccgtctcggcgcgctcggcgccgtagatcttgccgccctccagacgttcaaggaggtcgtcgggatccaggtccaccagctccaccgacgaggcgtaatcgaagatgcggtcggggatgcgctcctgcaccaccacctcggtggtggcggacaccttgtcgttcaggctttccaggtgctgcacgttcacggtggtgaacacgtcgatgcccgcgtgcaacagctcctcaacgtcgcggtagcgtttggcgtggcggctgccgggggcgttcgtgtgggccagctcgtccacgaggatgaggccgggcttgcgcgcgagcgccgcgtccacgtcgaactcgcgcagcgagatgcccttgtacggcatctcgcgtacgggcagttgctcgaggccgtccagtagggcgagcgtatcggggcgcgtatgcggctcgatgtagcccaccaccacgtcgcgtccgtggtccttcgccacatgggccgcctccaacatggcgtaggtcttgcccacgccggctgcatagccgaagaatatcttgaggcgaccgcgctgctcgttatcgcatgcacatgcgcccgcatctgccgaaatagcccgcagcagcttgtcggggttcggccgaatcggttctgtcgaggatgtctccatagcggacccatcatacgccagtgcctatgagcgcggcattaaggtcatggttctggcattaagaaagcatgaagatcgtgcggtagcgcgcttcgggcggcgcgccgctctgctgcagcacgccgcccgctaccagggaagcctgatgcgccatgtgcggccggcgcgctcgaccaacagcaggaacgagacgaacgctcccgctcccgcaagcgctgcaatgcccagcagcgcgaagagcagatccagtgccgacatcgcgaactcctttccccagtgcgcgcgtacagcttagccaagggggcgttaaggcgcgttgaagaagctggcgccggcgattaagatcgcgttaaggagcgctgcgcgcctgtccgcgacggggcggccgcatgcgctatactgatgcccatgaagaagacgagactcgatacgctgctcgttgagcagggctatttccccgatgcggatgccgcgctgcgcgctgtgctggcgcacgaggtgaaggtggacgacgtgtacgcctcgagcgctgccctgaaggtggcgcccgatgccgagatcgtggtgcgcgggcggcggcggttcgtgtcgcgtggcggccacaagctgcagggcgcgctcgacgcgtacgggcaggatgtgtccggcttgcgctgcatcgacatcggctcgtccacgggcggcttcaccgactgcctgctgcaggccggggcggccagcgtggcctgcgtcgacgttaactacggacagctggcgtggtcgcttaggcaggatgcgcgcgtgaccgtgttcgagcgcacgaacatcaagctggccgaccccgccgcgctcggcgcgccgttcgacgtgctcgtggccgacttgagcttcatcggcctggcgcagctcgcgcccgtgttcgcgcggctctcccgggaggggagcgtgttcctgggactggtgaagccgcagttcgagtcgcgccccggcgagacggagggcggcgtggtgcgcgacgaggccgtgcgcgggcgcgtggtcgaggaggtgcgcgcggccctggaggacgccggtttccacacgaccggcgtggtggagtcgcccatcaccggccccgagggcaacgtggagtaccttgtgcgcgcagtgtacaagaggagcgcctgaccgccccgcaccccgcaccccgcaccccgcaccccgcaccccgcaccccgcaccccgcaccccgcaccccgcaccccgcaccccgcaccccgcaccctcgtgctcattgcttatgatgcggtaacggtttccccttcgggcgccctggtgtgccatactcgctggacgacagggggaaaggacaagatatgagcgtgctcggcaatatactgtggttcgtcttcgcggggctttggcagggtgtgagctggatcctcgtcggcgcactgtggtgcatcaccatcgtgggtatcccggtgggcacgcagtgcttcaagatggccgggctcgcgttcttcccgttcggcaaggaggtcgagtacggcggcggagccggctccgccatcctcaacgtgctctggttcgttttcggcggcgtcttcctcgtcctcgaggccctgatcaacggcgtgctgctctgcatcaccatcatcggcatccccttcggcctccaatgcttcaagcaggcgaagctcgcgctgctgcccttcggcgccgtcgtgcggggaaagtagcgcgcccgctcatcgtccccgctcctcttcccctcttgctttttggcactgcgtctttgctctctgccgtccgctccctgctttctttccgccggcttcttgcgctgccgcattgattccgaaattgtcttgcctgcattcctgccgtccgttataatgttgtacgtacaacaaaggaggtagcatggccgacgcaatggtgacggcgcgcatgtcgtcggagaaaaaagaggcgggcaaccgcatactcgagcagatgggcacgaacgcctcgcaagcggtgaaccgtctgtacgactacgtgatagagaagcgcgagctgccgtttttcgatcgggaagaaaggaggcgctatacgcaggaggaaatcgccgaagcgatcgcctgggtcgacggcctttcccagaaaaggaccacgggacgcttttcagatatgaccgttaaggaggcaaaacgggagcgcttgattgccaaggggctcatgcagccaggtggcgatcgatgaggcttttcgtcgacacgaacattatcttagactacctcgacgaacgccccggatacgtcgggcccgcccgcaagctcatgattctgggcttcttgcatgagttcgatctgtggatgagcgcctcccaaacaacggatctgttctatttgctcacaaacggaggtcgagcttccgaggcaacggaagtaaagagaaccatgcaacgcgcccgacaattcatccgagtttgttctctcaacgaggccgatgtcgatgctgcgctcgactcgacgtggaacgacttcgaggatgcgtgcgtttaccagtgcgcgctcaagctgaaggcggacgccatcatcacgcgcaatcggaaagacttcgagaaatcatccatcagggtattagattgcgaggagctgttcgattacctagcggaagagaaagggctcgtctacgaagaaataccgttctgaaggctccgctcctgggccgtgcacctaagggttgtcataccgcaatggtcatggtgcaatgctgggaggcgatccgcggttgtcgcctcccaagaaacagggaaccggttacgccctagttcttcagcgagttgagcggcgcgggcatgcggccgccgcggtgggcgaacacgctgccggcgtattggttgaccggcatgaccggcgcgtagcccagcaggccgccgaagtcgaggcggtcgcccacggtcttgctgatggcggggatgaggcgcacggcggtggtcttgcagttgatcatgccgatggcgcactcgtcggcgatgatgccgaagatggtctccacggacgtgtcgccgggcacggcgatcatgtccaggcccaccgagcacacgcaggtcatggcctccagcttctcgagcgacagcgcgccgtcctcggctgcgcgaatcatgccggcgtcctcggacacgggaatgaacgcgcccgacaggccgccgacggacgacgacgccatgacgccgcccttcttcaccgcgtcgttgagcatggcgagcgccgccgtggtgccgggtccgccgcactggcccacgccgatggcctcgaggatctcggccaccgagtcgccctcggccggggtgggggccagcgacaagtcgaggatgccctgctgcacgcccaggcgcttcgacgcctcgcgggccatgagctcgccggcgcgcgtgatcttgaacgccgtggccttgatggcttcggccacgctcgtcagatcggcgtccttgggcaggtcggccagcacggcgcgcaccacgccgggccccgacacgcccacgttcaccacggcgtcggcctcgcccgagccgtggaacgcgccggccatgaaggggttgtcctccacggcgttgcagaacaccacgagcttgccggcgccgatgcactggcggtcggccgtggcctcggccgtcgccttcacgatgccggccatcttgagcacggcgtccatgttgatgcccgcgcgcgtggagcccacgttcacactcgagcacacgttgtcggtgacggagagcgcgtgagggatggagtccatgagcttgtggtcggcggctgacgcacctttgtgcacgagcgcgctgaagccgcccacgaagtccacgcccacctccttcccggcgcggtccatagccacggcgataggcgtgaggtcggtcgcgtcggtggcggcgcagatctcggcgatgggcgtgacggagatgcgcttgttcacgatggggatgccgtactcgcgctccagctgctcggccgtgggcacgaggcgctcggcggccgtggtcatgcggtcgtacaccttgcgcgccatgacgtcgatatcggagtccgtgcaacctcgcaggttcagccccagcgtgatggtgcggatgtcgaggtgctgcttgctcaccatggcaagcgtttcggcgatttcggcaggcgtgatctgcatggccccgtccttctctttggcgtgctcggaatgcgtgtcgaaccagtctagcaaaccgcgcgtgcggcggcggcaccgttcgttcgattccgaggtttcttctcacgaggaatgcgaaaaaagaacggacgtctcatatggaacttcgcagcgagattgcaggagccggtgatggggcggcgaaggcgcaacgggcgcgcgtcggctcgacgcgagagagggggtcgggggcgggtgcgaaaagaggggaaggctgggcggaaggaggctaggcggggccggtgctcacctcgccgtagggcagctcgcggcgcgtcttgtcgggcagctccaccaccagcttgaagtcctcggtcaggtcgacggcgcgggcacgcacgcgcgagccgttgcgcgccacgacgatgggctggcccagaaggaagcaccgacggcggtactcgtcgtagaacgagcggtggggaaggctctcgtagaggctccaaaagcgcgccagcatctcggcggccagccggctgcgcagcgcgccgacggcctcttcgcacacggcaccggccacgtcggcgatctcgctggggaaaccggaggcaggcacccgcacgttcacgcccatgccgagcacggcgtgctcgaagcgtcccgactccatgtccactacgccctcggtgaggatgcctgccaccttgcggccacggcagaagatgtcgttcacccacttgatgagggcctcctcgccggtgacggcctcgatggcctgcgcgcacgccacggcagccgcgcaggtgaggtactgggcggcgtcggcctgcagccgggggcgcagcaccacgctcaggtacacgcccgcgccggcgggggagtagaacgtcttgcccagccgcccccgtccggccgtctgttcctcggccaccacgaccacgccctcgggcgcgccctcgagcgcccggcgccgcgcttcggcgtttgtggagtccacgctcttgcgcaccgttatatcgaacggatgcccgtccgggaggaaccgctcgatgctggccggcgacagcaggtcgttctcctgcgccaagcgatatccccggttcgtggccgcctcaacaacgtacccttccgcccgcagcacctcaacggccttccataccgcgttgcgggtcacccccagctcctctgccagccatgctcccgacacatgccggtcccgctggcactccagcatccgcagtacgagctctttggttcccatcgcgcgcctccctcgttcgtccgcttccatcctagaagtgcggttccctcgctgtcaacgtgaatgataaagaaaggtgacaatgagaagcgcgcaaccgctcttttatgagatacgaatcgaaaaatagaacggatgtttcacgtgaaacatcaggcttatgctctgcgcaatgaaagattcgcgcggagtccggccttcgattcgtgggatgaagcgtttatgcggaatgaaaaattcatgtcccgaaaaagcagatgcagaagcagatgcggaaggggatgcagaaggggatgcaggaggggagggggggctctgcgcatcggcttcgccggcggtcttttccagcggctttttccggttgatttttcgtctgccggcttggggtctccggttacggtcggatttgggtggggaaagtccgggaatcggggagcggcgttgaaattctgcggttatcctcgtacaatggacgctattgaacaagttgtctattattggccgaaatgttcaaaagcgtgtaattcgcctattcgacctgccggtatcggtaaaaacgaagggagccgcatgacgacggctgttgctggaaaaatggctcggggcaccgcgaaatcgcttgtaccggtcgcggtcgcacccgttcccgctgatgcgaagtcggacgatggcgcccgttccgttcccgcgtgctgcgaggaccggcggatcacgcggtcgaagcgggcgctgcgcgacgcgctcatcgagctcatggaggagcgcggcttcgacggcttcacggtgaacgacctgtgcgtccgggccgacctgaaccgcgggacgttctacaaccattaccacgacaaggaggcgctgctcgccgcgttcgagggcgagatcatgcacgacctcgagcgcttccaagtccagatgcaggaccttacggtgcgcagccttatgacgtaccgtgcgcgcaaaaagccactgccattcctcgtggagctattcgactacctgcgcgagcagggcgacttcctgcacgcggtgctcggccccggtggcgatgtgcgcttcggcccgcgcctgcgcgactcggtgtgcaccaacctcgtgcagtccatcctgcacgagcgctaccgcaatgatccctcgccgttcgtcggctactacgtggcgttcttcgcctcggcgtacctgggcgtgatcgagcggtggatcgagacgggtatgcaggagagctcggaggagatggcgttgatcgccatgcggctgttcttcatcaagccgggcgaatcgatcaaactgtagcgcctcgaagcgcaagccgaggaggcggactctgtgaaggaacctatgaaggagagcgtcatggcgaacgagcccatggacaccaacgaagagcgggcagggcgcgtggaggcccggaacgaggctgccggccaagggttggcgggtggagacggcgcggaagggccggctgtgacggcggctgaaggcgctgccgtggagcccgtcccgctgcatatcggcatcgacgtggggtccaccacggtgaagctggccatcctcgatgcggcgaacgacgtgaagttctccgtctatcgccgccatcacgccgacgtgcgcgccaccatcgtggaagtgctctcggaggccgcagccgacttcggcgacaagcgcatgaccatcgccatcacgggctcgggcggcctgctgctcgcccagtggctgggcatcgagttcgtgcaggaggtcatcgccagcaagacggcggtggaaaccttcatccccgccaccgacgtggccatcgagctgggcggcgaggatgcgaagatcatctacttcgaccagggcatcgaacagcgcatgaacggcacgtgcgccggcggcacgggcgccttcatcgaccagatggccgcgctcttgaacaccgacgccggcggcctgaacgtgctggcgcagggcgcgaccacgttgtatcccatcgccagccgttgcggcgtgttcgcgaagaccgacgtgcagccgctcatcaacgagggcgcgcgcaaggaggacatcgccgcgtccatcttccagtcggtggtgacgcagaccatcagcggcctggcgtgcggccgccccatccgcggccacgtggccttcctcggcggcccgctgcagtacctccccgagctgcgcaagcgcttctacgagacgctggagctggacgacgagcacatcgtcgtgcccgacaacgcccacctgttcgtggccagcggctgcgccatcgcgggcgcggccagcgagacgacgcgtgccgagcttctgggcgacgtgctcgaccgcctgaagagcctcggcgacatccaaggctccgaggtggtgcgcctgcccccgctgttcgccagcgatgaggagtacgcccagttcaaagctcgccacgacggcgaatgcgtgcgtcgcggcagcctcatggactacgagggcacggcctaccttggcatcgacgccggctccaccacgttcaaggccgcgctcatcggcgaggacggcgcgcttctgtggtcgcattacgccagcaacaagggcgacgtgctgggctgcgcccgcacggcgctcacgaacctatacaacgccatgccggtgaacgcagacaccggcgagccgctcgtgcgcatcggccacgccacggtgacgggctacggcgagcacctgctgctcgaggcgctgcgcgtggactccggcgagatcgagacggtggcgcacctgcgcggtgcgcaggagatgctgccgggcgtggagttcatcctggacatcggcggccaggacatgaagtgcctgcgcgtgaaggacggcgtcatcgaccacatcatgctcaacgaggcgtgcagctcgggctgcggcagcttcatcgagagcttcgccacgggcctcaacctggacgtggccgagttcgcgcagacggccgtgagcgccgagcgccctgtcgacctgggcagccgctgcaccgtgttcatgaacagccgcgtgaagcaggcgcagaaggaaggcgccaccgtgggcgacatcgccgcgggccttgccatctccgtcatcaagaacgcgctgttcaaggtcataaagatccgcgacccgcacgacgtgggcacgaaggtcatcgtgcagggcggcacgttcctgaacgacgccgtgctgcgcgcgttcgagcagctgtccgaggtccaggccgtgcgccccgacatcgccggcaacatgggcgcgttcggcgccgcgttgctcgcccgcgaccgctgccacgaggccatggcgctcgaggcgcgcaaggcaaaggcgggggcggcgtggagctccgagaacgacgagctggccgcgcccgccgcggtgtgctcgaccctgctctcgctcgagcagctggcggccctctctcccacgcacaagaccgtgcgctgcaaggcgtgcgagaaccactgcctgctcaccgtcaacgacttcggcgtggacgaggccacgggcaagcaccgccgcttcatcacgggcaaccgctgcgagaagggcgcgggcacgttcgacgaggccaaggccgccgtgccgaacctctacgagtacaagagccagcgcctgttcggctacgagccgctgcccgccgaccgggcgacgcgcggcagcgtgggcatcccgcgcgcgctcaaccagtacgagaactacccgttctggttcacgttcttcacgaagctgggcttccgcgtggtgctgtccgacccgtccacgaagaagacctacgaggccggcatcgagtccatgccgtccgagagcgtgtgctacccggccaagctttcccatggccacatcatgaacctgctggacaagcatcccgacttcatctggttcccgtgcagcaagtgggagcgccaggaggacgagggcgcgggcaaccacttcaactgtcccatcgtggccagctaccccgaggcgctgcgcctcaacatcgacgagctgcgcacgtccgatgtgaagctgctcaccccatggctgccctacgaccagaaggagcacctcaagaagcgcctgttcgtggagctggtggaggcgcaccccgagctcatgggcacggcgggcgcgccgacgcaggccgaggtggacgccgccgtggatgccgcgtgggccgaggacgaggccttcaagcgcgacatccgcgcgaagggcgaggagacgctcgcctggatggaggccacgggcacgcacggcatcgtgctggcgggccgtccctaccacaacgacccggagatcaaccacgccattcccgagctcttgaccagcttcggcctggccgtgctcaccgaggactccatcgcgcacctcggcacgctcgagcgccccatccgcctcgtggaccagtggatgtaccatacgcggctgtacgcggcggcgaaggtggccaccgagcggcgcgacctcgacctcgtgcagctgaacagcttcggctgcgggctcgacgcgctcaccaccgaccaggtgcaggagatcctcgagcgcgcgggcaaggtgtacaccgtgctgaagatcgacgaggtgtcgaacctgggagcggcgcgcatccgcgtgcgctcgctcttggcggcgctcaaggaccaggccgacgagcgggccgacgccgagcgcatgccgcgcggctgcccggcgctcagcatcgaccccgagaagtttgccgccacgcgcgaagctgccgtccaggcaaagtccggccaggccgaggccgtaatcgcacgcgagctgaccggcgcaacccccgagacgttcacccaaaaggcggcgcccgaggtcatcgcgcgcttcaggcagcgcgagggcgccaccaccgagttcccgcgcgcggtgttcaccgaggagatgaaggaggccggctacaccatcctgtgcccgcagatggcgcccatccacttcgagctgctggtgaagatcttccaccgcaacggctacaacctggagctgctgccgtcggtggaccacggcgcggtggacgcgggcctcaagtacgtgaacaacgacatatgctacccgtccatcctggtcaccggccagatcatggaggccgtcatgtcggggcgctacgacaccgacaagctggccgtcatcatcacgcagacgggcggcggttgccgcgccacgaactacatctcgctcatccgcaaggcgctcgcggccgtgggcctgccgcacattccggtgatcgcgctgtcgttcaaggacctgggcgagagcaacccgggcttcaaggtgacgccgagcatgctcctgcaggccgcgtactccatcttctacggcgacctgctcatgatggcgctgtaccgcacgcgcccctacgaggcggagccgggcagcgcgaaccgcctgttcgaccactggatgtccgtgtgccagggtcagctcatgcgcggactcaagcgccgcgagttcaaggacacggtgcgccgcatcgtggaggacttcgacacgctgccgctggtcggcgagggcacgaagccgcgcgtgggcgtggtgggcgagatcctcgtgaagttccaccccacggcgaacaaccagatcgtggacgtcatcgagcgcgagggctgcgaggccgtggtgccggggctggccgagttcttcctgttcggcatcgcgggcggcatcttccagaaagatccgctcgggcgttcggcgaagggggcgctgggaagccgcatcgggctctgggccatcgcgaagctgcgcgcgcccgtgacgcgcgcgctcaaggcttcgagccgcttcgagccgccggccgacatctacgagctggccgagtacgccagcgagatcctcagcctgtgcaactcgatgggcgagggctggctgcttacggccgagatggtggaactcgtcaagacgggcgcgcccaacgtggtgtgcacgcagccgttcgcgtgcctgccgaaccacgtggtgggcaaggccgtcatcaaggagctgcgccgccgctaccccgacagcaacatcgttgcggtggactacgaccccggcgcgtcggaggttaaccagctgaaccgcatcaagctgatgatcagcgtggcgaaggcgaacctagccgagaaggaggccgaggcgaaggcggcgcgcgaccggttcgtggacgccgcccgcccgcatgcaacccaagaggacgccggcgagctggagatcgagaccgagaaagcgtaatgccgaggggccgccgccgaaacgccgcggcccattcgccgaattcgggggggggggggcttcatgcaccgaatcctgtatactcgggagaaaagcttcgcgaggaaggcggcgcgtatgcggaggatcgaagcgttggcggccatggcagcatgcgcatgcctgtgcgcggcgctttctggatgcgccgtgaaggagcctgcggcccaggaggaggcggatccggctccgcaggcggccgttcagccgacccccgatttcaaggagtccgcgtccggcgaccctcggctgcgcgagggcaaggaggaggttaccgtgctcgtgctcaacgcgagcagcgcggagggagcggcgcgcaaggctgccgagaaaatcgaggcgctcggcttcgagcacgtcacgactggcaacgcctcgtactatcagaccgggaaccgggtttcgtatcaccacgaggagcatcgcgcggaggtggacgaggtcgcggcgctgttcgactcgcttccgccctacgatccctattgctacgaagatgcgaagagcggcggctggagcatggactacgacattctcgtcatggtgggttgaccgtcagctgcggacgacacggtcaactgttctcagggaagagaaccgtcggcgcaaagcgtcactattgtcgccgtgcgggcgcgcagccggtgcggagggacttcgcggattcgcaggcttccagtcaccgttttgacagctgtgaagcttttcggcgggaagcaggcgtttggcgctcttcacgacctgcgtaaacgcggagaagacgactgcctggctgccgaaatcgagctccaagtgaacgaaaagacttcagagcggttaaaacggtgacttcgagccccgcttttcgcgtagcgactttgtcagctgtggcgaacaactccgtctactagccccatgaacgtgtcggccatcgtctcgggcgattccttcgcgccgctctcgagccagcagagcaacacgttgtagaacgcgcccgcgtagaagtacacctcgtagcgcgcgggcgagctcaggggcatgtcgccccacgcggctatctcgcagtcggtgacgaggtcgagcagcgacgtggcggccttcgcgcggtggaaggccagcacgagcttcgcgttctcccggtagaagcggaacttgtactccacgagcgcgcggtcgcggaagccctcgcggccctccggcttgcccgcatggtagcgctcggtgacctggcggataccgtagtccaccagctcctccaccgaggagaagttgcggtagaacgaagcgcgcgccacgccggcctgctccacgagctcggtgaccgtcaccttcgaccagtccttgcggccggcgaactccacgagcgcggccagcagccggtccttcacctgctggttcgcgagcttccgcttgtccatgaggcacatccccccgttttgtcccgtcgcggcagttgacggcatcgcacaacatgatacaaaatgtatcacatcaggtagagcggggcaatggttcttcccgatgcgcgttgtcgcccgaaaaacgcggttttcgtttcaaaatcgtgcttttcgggcgacaacagggcttagcgagccgcatgcgaagaaccggtcaaaagaaggggaagacgccatgatcctgtacttcagcggcacgggcaacagccggtgggcggcgcggcggctcgccgacgccttgggcgacgccgaggtcgtgtccatcaacgacgccttgaaagcgggcgaggcgcccgcgctgcgctcggagcgtccgatagcggtggtggcgccgacgtacgcgtggcgcctgccgcgcgtggtggacgcgtggctgcgccgcgtgagcttcgaggacaaccgcgacgtctacttcgtgttgacctgcggcggcgccgtggacaacgcggcgaagcacgcgcgaaggctctgccgggacgttggcctgcgcttccgcggcttggccgaggtggtcatgccggagaactacgtagcgctctacgacgtgcccgacgaggaggaatgccgcaagctgatggcgcgggcgggggagcgcctcgaccagctcgcggccctcgtgcaggcgggcgtgccgtttcccgaggcgcccccgaccatgaaggcgcgcttccgcagcggcccggtgaacgccgcgttctacccggcgctcgtgcacgacaaggcgttcgccgcctcggacgcgtgcacgtcgtgcggcctgtgcgccgcgcgctgcccgctgaacaacatcgtgctcgaagggggccggcccgtctggaagggcgagtgcacgcactgcatggcctgcatcggcggctgcccgaccgaggccatcgagtacggcgagaagtcgaagggccgccgccgctactacctggaagagggcgcggtcgcctcgtagggcaagagtctgcccttgccgttcaacaggtaagacgtttccggtcgacggcaagggcagagcccatgccctacgggctagcctgccgatccagaaaggagcccccatgcgcttccctcacgagatagcgatcgatcctgcacgctgcatcggctgcgggctgtgccgcgacgactgcccggcgagcaacctctccgtcgcgggcgggaaggcggcgccgctcacgcaggcctgcatcatgtgcgcgcactgcgtggccgtctgcccgacgaatgcggtttccatcagcggcttcgacgaggagccgcgcccgctcgacggagcggaggcgctcgagcccgcccggctgctcgctgccatcggcgcgcgtcgcagcatgaggcgcttcgccgaagggcccgtgtccgacgaggcgatcgccgacatcgtggaggccggccgcctcacgcccacgggcaaaaacgcccaggacgtctcctacatcgtgctgcgcgagcgcctcgaccgctgcgagcagctggccgtgcgtctgttccgccgcatcctacctctcgcccgcctcgtggacgccacggcgcgccgcacggaggttgacgagcatttcttcttcaaaggcgcgccggccgtgatcgtggtggtggcgaaggaccaggtgaacggcgcgctcgccgcttctaacatggagcttgcggcccagacgcacggccttggcgtgctctacagcggcttcttcgccttggcggccaagctctcgcccgcgctgcgccgcgagctcggactcgcgcgcggacagaaggtggtcgcggcgctcgtggtgggccaccccgccgtgacgtaccgccgcaccgccccgaaggagcctgcggacgtgcgcttcctgtgagagcgtgccgcatgcggcggttccgtgtccgttccgtaaattgttatcaaaaaagtatcattttgcggtagcatgaggcccgaacaaaagccgccgtctgaaagaaggaaccatggcctccctctacgatttcaccgtcaagaaccagcagggcgaggacgtctcgctcgccgactaccaggggcgcgtgctgctcatcgtgaacaccgccacggaatgcgggttcacgcccacctacgcccagctcgaggagctgtaccgcagcctgcacgagcgcggcctcgacatcctcgacttcccgtgcgaccagttcggccaccaggcgccgggcacggacgaggagatcgcgcagttctgcacctcgcgcttcggcgtgacgttcccgcagttctcgaagatcgaggtcaacggccaggacgccgacccgctgttcgcctacttgcagcagcagaaaggcttcgagggcttcgacgagggccacgagctcaccccgatcctcgaggacctgctggcaaaggccgaccccgactacgcctccaagcccgatatcaagtggaacttcacgaagttcctcgtcgaccgcgcgggcaacgtcgttcgccgcttcgagcccacggccagtacccccgacgtcgtgtcccccgccgtggaggagctgctgtagcctccgccgccaacgcctgcgccaacttcgctgccgcatcgcattcgatgcggcagtttttatccgaacgaatattctaactccccctttgacgcacagctcggcagcttgccgatggaggcttccgcgtcgatcggcccggatccgcatgcggcccgctgcccggtcggccgccggcgcccctcttcgcgttttctgcccctccgagtcacagttttgactgctctgaagcccgcgcgggcggcctggcgggagcccgcttcgcgccacctgggcgaacggcctcggccggccgccgctcgggcgtccaggcggcccgcagggcgtcaaaaggcttcagagcggtcaaaactgtgactcggagggcccgaaacccgaagggcccctcccctttggcgcacggcccgcccgtccgggcgcccgattcgcgcgcggcgccttccgaatcgggcgattgcacgccaaagggggagtcggaacggatggttcacgtgaaacatcgaggctcgatgcggcccctgcaacctcttcgcgacaaaccgcgtgcgatctgccatcatcgggtggtggaaaggcggcggcatcaggcgtatcgtgtcgtggcgaggagtaggaaaaacatgatcggttcgaacattcagagcaggcgcaaaatgacgggcctcacgcaggagcagctggccgagcgcttgggcgtggcgcggcagaccgtggcgaagtgggaggcgggcgattccgttcccgatctcgcgcacgcgggcgcgctggtcgaggcgctcgacgtgtcgctcgacgcgctcgtgggctttgacccgcagggcacgatgctgcccatgccgccgcgcagcactcctacctgttcggcctgttcggcggcttgcagtccaagatcgcggagtggacggcggccgagcgcgccgcgaaccccgacgcgcacctcacgctggcctgggtgccgcacgactgggtgcgcggcctgtacttctacgacgacttcgacgtgcggttcgccgagacgttccacgacggctcgtggttcgcaggcgtcgaccaggccgacctgctctcccgcatcgcctgtcctgccgtctacctcaaggcgaagacgaactacggcgaggacggcctttcgctggcagccaactccgacgaggacgccgcgcgcgtgcaagagctcgtcggcgcctgcgagacgatcgtcgtcgagtcgggccacgacatccactacgatcacccagaggcgtttgtggaggccatggacagagcggccggaaataactgatcgaacggcgccgcgtggcgggagcctgtgggcgcgaggctacgcggggcaagcgcccggttccgacagcagttcgaggaagcaggcgagagcggtggcatgcgaggctccgccgctgccggcaccggcgggccgcgcgccggcatccgggcgtcggcctgcgacgcgcgcctgcgcggggtcgcgaacggagccttcgtcccggtagagcgcgtgccagctcagctgcaacccgtcggcggcagccgagggcacgagggacatgcgctcttccagccggtgcgcgagggagtcgtccgatgcaaggtcgtcctcggacaataggtggatgccgtcgccgtggcccatcaggtagagctcctcgtagcgggagcagggcagcagcttgacggccggccggaagccgcggcttcggcaggcggcggcgaacgtgtccctcaacggcttgcaggccttgtgcgcgaacaggaggaacgtctcgtggcgcagggatgcgagctccgcttccggcagtcccgccgcctctcgcggcaggccgaacaccaaccggctccccggtcgcgagatcgccgccattcccacgccggcagggggcttgaaggccggggcacctgcgtccggcgtggccacccggccgtcctgcccgtcctcgctgacgcttcccgccccgcaaggacgagcctctttcaccaactgcacgaacgccacgtcgcaaaggtcctcggccaccgcctctcccggcgtctttcccgcgggcggtgccacgtactccacgatggtgcgcggatgtgcgcgtaccgttccgtccgctgcggccgcgagtcgtgcggacagcggcctgagcgcgggcgtgtcgtggatgcggatgcgcgcgggcgccacacggcgcaattctgccagctcgtcctgcatgccggtgtagaggtcgtccatgcgcagggcggtttggagcaccgtgtcgcctgccggcgtcagcctcacgggcaagatgtcggccaccagcttcacgttcagctccttctccagcgcacccacgtggcggcttagcgtgggctgtgacaggttgagggccttggccgcggcagagtagctgccttgcagcacgacttcggcgaactcgcgaaagacgttgatgtccatgctcccctcctgtggcacggggttccactcgtcctttccatcgtaccacgaattgacgcttatagcggtcattccgacggcgaacatgctttgccggaggggaaggccgccgcccggccatcttgccgccgaagccccgcccgtgcccttgcgttttccgcataccggtatgcaggttttgcccgcatgtgggccgaagcgcatggccccatccgatactcgcattttatctatgcaggtcagccctcgtatactgcaatcgcagactccttttgcggagcatagcgcgcaacttcacggggagtcgcatgctcgagacgaaacggaggaaggggagcatcatggcgcaggaaaagggcgtttcacgtcgggacttcttcaagggggccggcgtcgccgcggcgggggccgccatggcgacggcgggcttgggcctcgcggggtgcgcgggcggcgggggagcatcggccgacgcggagcagtgggaccaggaggcagaggtcgtcatcgtcggctacggcggagcgggtgcgtgcgcggccatcgcggcggccgacgcgggcgccaaggtgctcgtgctggagaagaacgccgaggacaagcacctgtgcaacaccgtcatgtcgggcggcatctaccactctccggaccccgacggcgacaaggaggccctgaaacagtacctcaaggccatgttcagcggcgagaacctggacacgaaggccgagggcgagcagtcgcccctgttcgtcgatgacatcgtggagaagttcgccgagtactcgccgaagaacgtcgagttcatgcagagcctcgaccccgactacaaggtcatcgagcgcggtggcgcggcgttccccgacttccccggcgcgaaggagagcggctacaagagctacaactccacgtacggcaagtcggccaccgggccggactatcccacgctcgacctgcccaaggaggacacggccgccggcctggcgttcttcaactgcctgaagaccggcatcgccgcccgcgccgacaacatcaccatagcctacgagacgccgggcaagagcctgatcatggacgacgagggcgccgtcatcggcgtggttgccacgcagggcgacaaggacatccgcgtgaaggccggcaagggcgttatcctgaccaccggcggctacgagtacaacgaggagatgcgccgcgcgtttttagagggccagggcatcacgggctgggcgttctacggcacgctgtcgaacacgggcgacggcatccgcatgggctgcgaggcgggcgctcagctggcgaaggtgggcaaggccgcgtcgcgcctgatctggtcgtgcccggacgtgcaggtgggctccatgaacgtgggctcgatcacggactccgtgggcggagccggcaccatcgtcgtgaactccgagggcaggcgcttcatggacgagacgctcatcacgaaggacccgagccgctacttctcgtacaagaacgccgtgcacatggacatcgtcacgctggagttcccgaacaccccggcctacatgattatcgacgagacgaagcgcaaggcgggcccgctggtgaacaccacgctctccacctgcggattcggcatcatcgattgggataaggacaatcagaacgccatcgacaacggctggctcatcaaggcggattccatcgaggagctggcgcagaagattcgcgacacgcacgagctgaacgagggccgcatggatccggccgtgctcgccgccaccatggagcagtaccagaagatggtggacacgggcatcgacgaggagttcggccgcacgagcgccacgaagaacgcgctcaccggcgaggtggtcgaccccggcttccaggccatcagcacaccgccgttctacgccatgccgctcgtggcgggcggcccgaacacgaagggcggcctgcaggccgacggcgaccggcgcgtcatcgactggaacaacgagcccatcccgcgcctgtacacggccggcgagatttcctcgtgcttcaagttcgtgtaccagggcggcggcaacgtgaccgagtgcatcgtgtgcggccgtattgccggcgagaacgcggcggccgaaacggcttgggacgcgaagtagcctgaagcgcccgcggcgcggcgggtcggcctgcgggcgggccgtgccagcgcccgcccggcgccgtttggcgccgggcttccgtaccggatccatgccaccggcggggataccctccctccccattccccgccgcgtggctggctcaccatcgagggagataacccatgagaaacgtgaaggccggcatcgcgtcggccgtgtgcgctgtgtgcctgctggcggccgttgcggccggggcgggctgcgcgccgaaggcccacgagggcccgctggcgaaggatgcctccataaccgtcgacttcacgtggtcggccgacgccaactgcgcgacctgccatgcgacggaggacgggtcgctggagggcatgccgtgctacggggccctttccgccgccggagggaacacctgctccgtgtgtcatgccgacgaggccggcctggagaaggcccacgagggcgccacgcccgaccgcgcgaaggagcgcgccacaaggttgcgcgacaccgccatcgacgagcaggcatgtttagcctgccatggcagctacgaggagctggcggccaagacggccgactcggccgtgctgaccgatgccaagggcaccgtcgtgaacccgcatgcccgccccgcgggcgagggccatgccggccagacgtgcgccgactgccacgcgctgcactccggcgagcccgtgcaggagacggcgcccgagttctgcatcagctgccaccatacgaacgactaccagtgccacacctgccaccaatgaggtacggcgggcgccggtcctgaagtcggcacccgcctctcaggccgccgtaggctcagtccagctcgagcagggcctcgatggcggcctccacgtcgagcaccggaaggccctcgccgtcgaagcgctgctccatgcgaagggccaccgacgcgagctcggcctcgttcaggttcgccacgctgggcgtgccgtggaacttgaggcccaggaggcatcccttggccttcacgaccaccacgtgccccgtcgcgccgccgcccgcgtcgacgacgggcacgagctccgcgccgcgatgcagcacgccgcagaactcgggcggcaagaaggcgaagggcctcacgccgctcgcgggcaccacctcgtcgatcgcatcgaaggcgatggccatgtcgcctgcgggcgtgggcacgacgagggcgttcgagcgcgccgccctctcgctccctccgctgatgagcttctcgatccaacggagccgctgctcgcgatcacgcatggcgcgctccctcctccaagccggaatccagcaggcgtctcgcgctcaccacggcgcatgcggcgccgtcctgcaggaacgcgtacccgaagcagccggcgaggcgcgccgtcctgcggttgagcagcgctggaagctggcacaccgatacgcgctcgtagccgtcaacctcgtccacggcaagcgctcgccgctcgccctgcgcctcgagcatcaccacgatcctcggtctctcagccttgaacggggtggacgcgcccgccccgttcagcatctcgacgcgcgcgccgtctcggtccacgtagcaggccgtccccgacgcgtcgcagccgccgacgaggcgctccgggtgatgcccctcgaaccggacgatctgctgcgcgggcagggcgaagcgctctgcgccgacgcgcacgatggcggcctccatgacggtgaacggcgcggggaagttcatgacgatctcgagcgtgccgtggtcggtgttgcgcaccttgccccgtccgcccatgttgtacagcatggatccgatctcgatgaactgggaggacatgccggcgaacgggcccgagcgcgtcgaggcgaatccgggcatcatcaagaacgagcctatctcctcgtcggtgtactcttcgatagggcgggtgagcaggccgcgctcctcggccagctgtccgatgcggcgcgcgtcgaacaagtggccgtcgtgttcgatgcggcagatcacctcggagccgtcgctctccagcgtgaggcgcatcgtggcgcagggaggcttccccgccgccttgcgcccctcgggcttgccaatgccgtcgcgcaggcacgcccggatgactcgtttgatgatctcctccatcgacgccagcacggactggtcgagcgccatctgcccgtccgcgatgtcgaacttgacctgcacgccgaaacgctcgctgtagtctgcgacgagggcgtgcagggagggggcgatccttccgaacggctcgatgcgcgaccgggcgacggccgtgcgcagcccgtccacgacctgggcatgcgtgaagaagatggtgttgagctcgcggtcgtgcggcgtgcgctcgatgcgggcgcgcagctggcggtgcacttcctcgaggcgcgcgagcagcttccaaagctcgtcgtagcgcccgtccacgctgctgcggttcgcgaaatcgatgcgcagggggatcgccgggctgttctcgcctgcgggctcgtcggaggcagaggcgaacgaggggacggcgtccgcgtcctcgatgatggcgaagcggtccacgaagaacgaggccttgatggttatgagcaccttctcgggggtgggcgagctgaagcggacgaacaggccgtggtcgcgcaggtaggagatggtggagggatcgctcttgaccgtgcacgggtggaaggacagcgagctgcacaaaggcgcgatgcgccgcacgacgagcgccgcgcgcacgttctcgagcccgcagttgggcttgagcatgacctgcaccaccagctcctcatcgcgctccatctcggcctccttccgctatccgtccaagtcgggccgcgcgaacacgcaacggttcttcccggtttccttgccgtggtacagggcgcggtcgacccgcgcgaagttctcggcgaaggtgaggttgggatcgtaggagctcaggccgaacgtgagcgtgcaggtgaactcgccctcgccgtcgtcgatgcggtaggagcccacctcctcgcgcatgcgatcgcacaggcgcagcgcctcgtggtcgggcgacgagaacagcacgacgagcagctcctcgcctccccagcggatgacgggctggcttccggcgaggtcgtcgaggatgtcggcgatgcacacgatggcgatgtcgccggactggtgtccgcgcacgtcgttgatggccttgaagtcgtcgatgtcgcagagcgccagaaccgtgttcgcctcgcggctggcctcctggatcttctcctcgaggtagtccgtgaggtaatggcggctgaacaggccggtgagctggtcgcgcatggcgaggccgcgcatggagtccagctgctccttcagcgcggcgtttcgcgcgcgaaggcgctcgacctcctcgacggggtcgcgcgcgggttcgtcggcacgctccctcacgccgcgccgccgtccgcgtcctggctgggcctctcgagcgtgaagcggtcgataagctgcttgaggctgcgagcttgctcggcaagctcctcgccgatgacggcgctttcctcggaggcggccgagttctcctgcaccacgtcggacaggctgtccatgctctcctggatctgcgacacggcttcgagttgctgcgtggacgcctgcgcgatggccgacatcatctccttgacgccctccgtagccgcgacggcgctctccatgttggcggacgtgtcctcgatgagggcgctgccgctctccacgctttccgccgcgcgcaccgcgagctcgtcggcggcgcgcgatgcctcgctcacctgggttgccagtcgtcgtatctcctcggccacgatggcgaatccacggcccgcgtcacccgcgcgccgcctccaccgaggcgttgagcgcgaggatgttcgtctgaaacgagatgtcctcgatggagttggccagctgcgagatgctgcgcgtgctcaccttgatgtcgccgatgacctctactgccttggatatctggccgttgctgcgctccacggcttggagcacgtcggaggtgttctcgttggctgcgatcacgctctcgttgttctcctccaccatctgcgtgatgccttggacgttgactgccagctcctcgatggacatggcctgttcggccgagccctgagcgatggtttgcgagctgtcggacatctgcgacgacgagcgttccacctgctcggccgtctcgctcaggcgctccaccgtcagacgcaacgacgccaccgtgcggttcatggactcgcccagctcgcccagctcgttttcggacgcgcaggacgcgttcgccgtgaggtcccctgcggccacgcgcttggcgacccgctcgatctcgcgcaccggctcggcgatggcccgtgtgatgcgccgccacatgaccaccacgagcgcgatcgtgagcagcccgatcaacgcgatggacaccgacgtggcgatctcgacgtcggtggtcttctgcacgaagtcggaggccttcttctcggcagcggcgacgatgccgtcggaaagctccagcgtgacctcgcgctgcggcaggtagctctgctcgtagagcgagtgcgcacgttccgtgtcgcctgccttcgccgcctcgagcacctggttgcgggtctccgcgagcccctcgtacgcgacggtgaactcggcgagcgcgttcgggtcggccgtgaagttggacgagatgacctcgaactcggcttcgcgttcggcggacagctggtcgatgctggaaagcaactgtttcttttcggcgggagactcggcggagatgtactgctccaggtagcccgacatctcgtcgatcgtgttgcgcagcgatatggcgctcttcgacacctggtaggggcgctgatagaactcggtggtcatcgaagagttctcgtgcacgccgaagatggacgcgccgatagacaccacgaacagcacgatgatggtgacgtaggaaagcatcaggatgcggctgatgctcgcgtttttcaaagacggtctcatgaatgcgtctcttccgatcgtttctggtagatggagtcgccccggtaggcgaaccgcttgcggtcgcggacgatctccgcgtgcccgaggatgaggtagctcgaaagcgccagatgacggtgcagggtgtccagcacccgctcgcgcgtgggctcgtcgaagtagatgatgacgttgcggcagaggatgaggtcgtagcggcgcctgagcgcctccgggtcgctcaggttcgcccgtgcgaacgacacgtgccggcggatggaatcgaccaccgcgaaaccatcgccctcgcgcgtgaaataggacgtcagccagcgagggggcaccttgtccacgcgcgtcgcggggtacacggcccgccgcgcctcctcgagcgccggctccgacacgtctatgccggtgacgcgcacgggtgggaggttacgtccgcgcctgtagtcctccacgatcatggacacggtatagcattcctcgccggtggagcagcccgcgcacaggatgttccaggtgcggcgcggtcgcgaggcctccagctcgggaaacgccgtggtgcgcaggaagtcgaactgcctgcgctcgcgcaggaagtaggtgtagtgggtggtgacgaggtcgatgaaacgagcggcggcctcgggattcgtgcccgactctataaggtcgaggtaatccgagaacgagggcagccccaagcgattccgctcgcgtgacagccggcagtcgagcaacactcgcttggaacgcatgttcagcccgagtgtgcgagaaaggtgcgtgcagacccgttcgaactctttgtcggtgaggtgctccaaaatctccgtttcccccggaatagctgtggtcaggctagcatagcacgtaaggcggggggggggcgttttttatggcgcaaccgggaaaagcgaaggagtagagcgggagcgatgcgcctcgtggcgccgtaggaagagagtcctgcccagctttccgctgacgtaggagctgggcaggttcgtcgagggctagaacgggtagggatgcggggcgtgctgaacgctcgtccagtgggtcctcgtcatctcctccaagatccagcggccgttgaagcggcccaggccggagttcttctcgccgccgaagggcacgtgctgctcgtcggccacggtcatgtcgttcacgtgcgtcatgcccgcgtcgatcttcagggcgaacgcggtggcgcgctccacgtcgcgaccgacgacggcggacgacaggccgtagtcgctcatgttggcgaaccggagcgcctcgtcctcgccgtgcgccacgatgatgggcgccagcggcccgaagctctcctgcatcgcgatgtcccaggtgggatcgacatccccgaacacgacgggcggcatgaccaggccttcgggctcgccgtcaagcagcacgcgggcgccctggtccttagcgcgctgcaccttcctcaccaagcccgcaagctgggactggttgataatggggccgatatcggtggccgggtccaacgggtcgccgcacacgagcttggacgcgcggtcgacgaagcgctcggtgaactcgtcggccaggctcgcgtccacgatgatgcggttcgtgctcatgcaaatctgcccctggtgcaggaagcggccgatgatcgcgatgtccacggcctgctgcacatcggcgtcgtccagcacgacgagcgggcagttgccgcccagctccagcgccacgcgcttgagcagcttgccgccggccgtcttcgcgccgatgccgcgccccacggcggtggagccggtgaacgagatgagcttcggcacggggtgctccacgaagtagtcgcctatctcgctgccgcgcccgatgagcaccgacagcaggctctcgggcagccccgcctcctcgtagatcttcgccagcaggatgccgcccgtgacgggcgtgtcgctggccggcttcaaaacgacggcgtttccgcaggccagtgccgtggcgacggagcggttggacaggttcatggggaagttccacgggctgatgacgcccaccacgcccagcggttggcggtacacgcggttctccttgcgcggcgtgtcggaggggaagatatcgccgtgcatgcggtaggggaagctcgcggcctcctcggtaatgttgcgcgcggcgcccacctcgaactccgccttggcgcggatactgccggactcgcgctggacccagccgatcagctcgtcgtggcgcgcgtcgaagatgtccacggcgcggcgcagcacggcggcgcgctcggcgggcaaggcggcggcccattcgcgttgggcgcgctcggcggcggcgtaggcctcgtccacgtcggcgcggttcgccagcacgtgggtggagaggacctcctggctgtaggggttcacgtcttgggcggactcgccgctcgcgccgtcgcgccaggctccggctatgtagagccggtcgaggccatcgtagggctgggggattgcgggggacgatgcgttcggggaaggtgccatggcgttctcctgttctcggagcgcggcgggatcgggttgtgccgtcgcgcgcgggccaatccgttcagtataggagcctgcgagcaggaggcatctatctgcggcgaacggttgattggcggaaaaccggtgatcaccggtgagggaggttatgcttgcgtggtcgcagggcctggcgagcgggccgtgacggcggggtacggcgtgccggctgttgccgcaggggattcgggagggcgcgcgggcacgcgggcgagcgcgatcgcgcggcgagcggacatgcggggcttgcagcccagcggcccccgtgccccaccgtttcgggccgcctgcgcggccgtggtcgtggtggtttggcggacgtggccgctgggcggcggacgcatgctgggcgcgcggaccgaagtgtgcgattatgaaagcacacagcggcgcagctgcgcggacgacgcggcggaaaggagcggacggcatgggatgcatggggagcttggcctgcacaggggacggcccgctgccgttcatcgtggccggcgtggtgctggtggcggcggcggtgctggtggtggcgttcgtgctcatgcggcgcaaccgctagcgggggcggggagcaaccatggacgggaagctggtcatctgccccacaccgcttgggaaccttggcgacatgaccgagcgcgcgctggcggcgctgcgcgcggccgacgtcgtgtgcgccgaggacacgcgcgtgacggggcggttgctggcggcgtacggcatagaaaagcggctggagcgtttggacgaggccctgatcggcgagcgcggtgcgggcatcgtgcagcgcgtgctagacggcgagaccgtcgcttactgctctgacgcgggcatgcccggcgtgtcggacccggggctgcgcctcgtgcgcgctgcccgcgaggcgggcgctgccgtggaggtgctgccgggtcccacggccgccgcgacggcctacgtggccagtggctgcgacaacccccgcttctacttcggcggcttcttcccgcgcaaggacgccgagagggccgcgctgctggacggcctgcgcgcgctcgatgcggcgctcgtgttctacgagagcccgaaccgccttgcctcggcgctcgccgcgctggccgccgcgctgccgcagcgcgaggcggccgtgtgccgcgagctcacgaagctgcacgaggaggtggtgcgcgggccgctgcccgagttgcgcgacgagttcgcggaacgaacgggtgcgggagggcgcggcgtgaagggcgagatcgtcatcgtggtggacgggccgaacgccgccgagagcgcggccgccgccgagggcgcgcagcaggccgccgccgtgcgcgccgccgagctgaaggcggcgggcgcccgcaacaaggacatcgcccgcgcgctggccgacgagttcggcatcgcgcgcaacgcggcgtatgacctggctctcaaggcgtgagcggcatggcagggcgcggtgcgggccgcacgggggcgcaggctcccgcgcgctcgggacgggcggcggccaagcgccggggtgcgaccgcggcgccggctccgacggtcctcgaggtggacgggctgcccgtgcggctcgcgcgcaagcgcatcaagaacgtgaacctgcgcgtgaaggccgatggccaggtggaggtatcggccccgctgcatgccaccgacgcgttcgtggcgtcgttcgtgcgcgagaagcgcccctggatcgaggcgaagcgtgccgagatggccgcctcgccgcgggcggaggccgcggcggcatcgcccgaggaggtggccgcatggcgcgccgtggtggaggcatgcgtgccgccgctcgtggccgcttgggagcccatcatgggcgtgagggcggggcggctcgcctaccgcaacatgaccagccgctggggcagctgccagccggctaccgggcgcatctgcatcaatgtccgtctggcgctctacccgcccgagtgcctggagtacgtggtggttcacgagctgtgccacctgcgggagcgcggccacggccagcgtttcaaggatctcatggacacctatatgcccgattggcgcgagcgccgcgcgaagctgcgctaggcccgctgcgtgaacgagagcgcccgtgcatcgaccgcctgcatccaggcgatgtacgtgtcggggcaatgggacgtgaacgccagccccaggtccacctccagcagctcccgcacggccgtgaaaatgccgaaggggttcagcaggctctccaacgtggggaggctttgcgaagcctgggcgtcgaacgagtcgagccgttccagcgcgtcggggctgtaggagtccagcagtcccgtgttcgcctggtacgcctgctgcatgagggcgagcgacgacgcaaagcgggtgctggcatagcccggcagctccacggtggtgccgtagcgcccgtagccccaggcggggagcggcagttgcggcacgaggtccgaggggttcacgatgttgaagatgcccgcgtacgcgtcgtcgccccggtttgcggacttcgtggggcacggcgcggcgaacgtgtaggcgtagacggcgtcggccgacgccaaggcgtcaggtccgtccgcccggtcgatgaggtcggcagccagcaggttggcgatggcaccgccgcggctgtggccggtcacgaggatgcgcgtacgcgccgggtctgcgccgatttcatccaggtagcgctcgagcgcctgcgcgacctcctgctcggccgtcttgaaaccgcgatggtcggcgtcgggcgatgccgcatccggcaggttgaagttgctgacccattccgcgccgtagcttccgcgtatgcccacgaacacgagggtttcaggcgagctgcccgtcgccgggctgcttgaggaggagccgcccgcagcggcgtcgccgtggcgggcggtctcgatcctgcggttggcgaacgtgtaggcggccacgtcgtgcgagccgttgacaagcgcggccaactggtcgagcacggcgctgcgcaactcgtaggaatcggtgcgcacctgggagaacccgagcgcgctcagggcccgctcggcataggggatgcggtcgccgctgccggaatagaagtgcgattcggagttgcatacggcgctgagcaccgcgcagttcgtggcaatgccgtggtggtagcggcgggaatcgccggcgaaccaggcgtcgtccagctcgacgctcgtggacgtgcggcccgacgggttgcccggatcgtgcgcggccacggtctcgctgcagtagtccaccatgatcgggccgtcaggcacgtccgccgccgcgaaggccggcatttccgcatgcgcggcgggcatcaggcccacggccccgcccacgaagtaggcttggacgacgaacaggccgaccagtgccagcgcggtgagcgatgcgttgatgacggatgcgatggggcggcgcggcctcgccatgggattccttcggacggtcggctcgggtacgttcgaatcagtataggaacgggcacccgggcgacacctattcgttgacaaagcgaaacaaagctgaagcttgcgtgccgaaggtgtggaggacggacaagtgcctgacggtgccttgcagacgtccctctggcgggaagagcgtagggtgacatcggacggcgtcgggaagagctgggcgagcgtcgggcggggacgaagtcgaatgcgcgacgaaggagaggcagggcgcacgcttggtcggcaaaccaggtgatcaggcggccttgggcagctcggcggtcgcttggcggcgcgccttgacgtacgcgtcgatggcgtcggcggtctgcccctgctgctcttcggccgagaccgtggccgtgccgtcgccttcctgggggccgtaggcgccgaagcccgcgtggttgccgccgacgatctcgatcgtccgcgcgccctctggcatgagcgcggcgctgtcggcgagtttcccgcggttgagcacctggtcctccgagccgtacacgacgagggcgcccaggtcgctggcggaaaggtcgctcgcggtgtacgcgcccagcagcacgaggcccgcgagtgcgccgtcttcggcgtggtcggccgcgtaatgagccgccatggagccgccgagcgaatgcccgccgacccaccactcgctcacctggggaaaagctgcacgcacctcgtcggccgcatcgatgccgaagaatgcgaagttgaagggcatctcaacgaccacagccaggtagccgcgttcggccaaatcgcgcatgagcggggcgtatgccgtgtactccaccttcgcgcccgggtaaaacaccagccccgtctcggccgcagggtcgccgaaggccacgtagtgtgctccctgctcgacgggaagctgcgctgtggacgcaaggttctcgtgcccggcgtctgcgtcgcggtagtagtcgctcgcatacacgaggaacgccgccaccgccagcaccgccgctacgacgagcgccacgagcacgatggccacccgccgcggccaacgtcggcgcggcgcggcggcgccggtcgtcgaagccgcagctgcatttcccgccgcgtccgaggcgctggattcggcgacggcctttcggccctcgaagttgttctcgttgcgttccatgcccccgatgatagcaggttcccgccgcgtgcgcctcttcgggttcgcttccatgccacgccgtcgacgccccgcattccttgcgtttcttgaatgtgacaagtatacttggcacagtgataataaaacttgtcactagcacaaacgaatgtttcaagtgaaacattcggagggtcgaacgagatggctcgggaggtgcggcatggacaaagaggagatcttggagaagaaccgcgaggacaaccgcggggctgacgagcggttccgcatcctgaaccagcgtcaaagctcggtcatggtcggcgccatgcttgtggtgtgggcagcgctgttcctgtgggatttcgctcacgggcaggatacgagcgcgcctgccgccatcatgctgtcaggcgttgcggccatgggcttcttccagttctaccagatgcgcatgaaactcagcctcgtgtgcggtttgctggcagcgttcggcgtcgtctcgttcgcagcaaagcacatcatgctgacgatgtaggcgcaggttgctatgataaagctgccttccttcggaatagataaggtgcatgacaacgacggcgaactggagctgcgcaatcgcctgaaagcggcgcgcgccgaagcggggctgtcccagaccgacctcgcacgtctcgtcggcgtgtcgcgccaaaccatctcttccatcgaaacgggcctgttcaaccctaccgccaagctggcgctcgtcctgtgcatcgcgctcgacaagaagttcgaggacctgttctatttcgattaaccgcatcaattgaggtgattatcctggacatcaactcgcttatcatgtagagtaataacatcaattgaggtgattttaagcgaggatcgatgtcgggcaaggtagccgaaagatggaaggtcgaagccgtgctggccttggtgcgggctgtaccttatgaacgattcgtcatcgccggattggggaacccgcaaggaaaaacgaggcggttcatgcagcttgtcggattcagcggtcggcaggttcatgagaccgtttgcgacttgcgcgtttccaattactcaaccggtcctcttcctgacgataagggacgtcctcatgacgtgtgaggtgtacgttaagctggctgctttcttctcgtcgggatgcgtgcaagcggtgtgcgtctcgtttcatgaagccgagcgccgattgtcgtatccgtaccgaagggagggttccgaacttgtctgaaaccgtgagaaccgtctgcgatgcctgctacaacgaggtcgatgccccggtggttgcggtttgcgagacgatcgatgtcaggggcgtctccgtaaccgacgagttctggtatcctatttgccccttgtgcggcaaccgcatcggttatgcggcaaccatggatcgcaatttcgagaagatgtatgcggcctaccgcgaggcccgggacgttccccggcccgacgagatcgtggccttgcggcggcgctacgggttctcgcagcgcgttttcgcagctatcctcggcatcggggtggccagcgtgcagcgctacgagggcggcgcccttccctcggagtcgcatgccgagctgctccgccaggcgcgcgacccccagatactgcgcgagcgcctgcgcggcggcgccccgcgcctcggcgagcgggaccgggagcgcgcgctgcgggccgtcgagcagcaggcggccagcaggatagactatgccgtggtgcgcctcgacctgctggattgcctgccgcgcacggcctcgccggaaacgggcttgcgcgccttcgacgccgaccgtctgcgagaggcggtggtctacctcgcggcgcacgtggggaacctgttcgtgacgaagctcaacaaggtgttgttctatctggacttctcggcctaccgcgacgagggcgccggcttcacggggctgcgctacgcccgtgccgactatggcccggtccccgatcagtacgacctcgtcatggccgcgctcgtggacggggcggcgcttgcgtaccgcgagcagggcgacgggcgcgttatcgtcgcgcgccgaggcgccgacctctccgccttctccccccaggaagtcgcccgcctcgacgctgtggccgccttcgcgaacggcttcgccaccaccgcggagctgtccgcgtactcgcacgaggaacgcgcctggctcgaaactccctcgggggaggtgatcggctacgacctcgcccaatacctgcgcctgcccgaaccgttgcccgccgaaggcgcccgcgcatagggcgcttccgcctcctggattcgcccgcaggcgttcccgtttcgtgtgcacggggcgagatgcggttcttcgcgcggggccctcgtgctagaataactggacgatgcggcatcatgagtcgcacgcagaccgaaggaagaggaaagcaccatgtcaaagggaacctactcgttcaccacccccatctactacgtcaacgcggccccgcacctcggcacggcgtacaccaccatcgccgccgacaccgtggcgcgctaccagcgcatgaacggttacgacgtcgcgttcgtcacgggcatggacgagcacggccagaaggtggccgacacggccgccgccaagggcatgaccccgcaggcctggtgcgactccatggagcctgcgttccgcgaggcgtgggacctgctgggcatcacgtacaccgacttcgtgcgcaccaccgagccccgtcacgcgaagagcgtgcagaagttctggcaggacctctacgacaagggctggtgctacaagggcagctacgagggctggtactgcgtgcacgaggagacgtactacgccgagagcgacctcgagaagaacgaggaggggcagctcgtgtgccccgactgcaagcgccccgtgcagaaggcgggcggcgaggagaactggttcttcaagctgtccgagttcggcgacaagctgctcgcgttctacgaggagaaccccgacttcatccgtcccgagacgcgcaagaacgagatcgtctcgttcgtgaagagcggcctgaaggacctctccatcagccgctccacgttcgactggggcgtgccgctgccgttcgacgaggggcacgtggcctacgtgtgggccgacgcgctgctggcctacctcaccggcatcggctacggcgacgagggcgagcgcgccggcgagttcgaccgccgctggcccatgcagtaccacttcgtgggcaaggacatcacgcgcttccactgcgtcatctggccggccatgctcatggcggccgggatgcccatcacccacacggtgttcggccacggcttcttgctcacgaagggcgagaagatgtccaagtcgaagggcaacgggctcatgccggccgacctgtgccgcgtgttcggcgtggacgcgtaccgctactacttcatgagcgacgtgcagttcggcgccgacggctccatctcgctcgagcgcatggtgcaggtgtacaacgccgatctggcgaacacctggggcaacctctgcagccgcgtgttcaacatgacgaagaagtacttcgacgggcaggtgccggaggtgccggcgtccgccgcggcgctcgtggaggccaacccgctgcgcgagatatcggacgagctctacgccgagtacgaccgcgccctcggcgacgtggacttcacggctgcggccgccgcggtgcagaagctcgcgggccgcgtgaacctgtacgtggaggagtccgccccgtggaacctggcgaagagcgaggagaccgccgaccagctggcggccgtcatctacaacgcgctggaggccatccgcatcatcgcgctgtacctggcgccgtttatgccgaacacgtcggccgaggtcttccgccgcctgagcctgggcgacgtcaccgccgtgaccgacatcgaggcggcgaccgcttggggccagctgcccgccggcaacgcggtggagattggcgaccccctgttcccgcgcctggacatggacgccgtcgacctggacatggagtagccttccgtggccgacgaaacgcaaactgaccccgtgttcttcgatacgctgttccaccgcaagcgcaagcacggcaagtgggacaccgtcgacgcgccccagctggagggccttgtggccgacacgcatgcgcacctgcagctgttggacgacccggcgcttgccttggcgcgctgtgccgcgcacggcgtcggtttcctctgcaccataaccgatgtgtacgaggacggccccgtcacgtacgaccgcctcgatgcctggaggcacgaggcggcggtcgacgtggccaagctcgtccaccgctgttgaggcgacccttgcccgcgcgtgccgcgggtgcgcatcgcaaccggctgccatccccataacgcgaagcactacgacgacgcgctggaggccgtcctgcgcgaacggctggccgacccgcgcacggctgcggtgggggagatcggcctggactcccactacgatttctcgccgcgcgacgaccagcgctcggcgttccgccgccagctgcgcgtggcgaaggagtgcggcctgcccgtcatcctgcatgtgcgcgaggctcacgacgaggcgctggccatcatgcgcgacgagggcttccccgaggcgggaacgctgctgcactgcttcaacttggattgggacgtgctcgagccatgggtcgaggcaggttgctacgtggcattcggcggaccgctcacgttcaagaagggcgacgacacccgcgaggctgccgcccgtgtgccggcagaccgcctgctcaccgaaacggacgcgccctacatgacgcccgagcccctgcgcggaaccgtctgcgggcccgagcacgtcatcttcacggccgagcgtctggccgaagtgcgcggctgcgcgcccggcgaggaacgcgcggcgctgctgcgccggcttttggagaacgcccggagcctgctcgaccgcgagccgacggcttggcagcagcaggccgcccgccagttctacgccaacgccttcgcaacgctgggcggagcggccccggccgccgccgacggacaataaggagctgccctatgaaccgcctgatcatcgtaggttcgccccgcatcgacggccggagcgcgcaccttgccgacctgctgttcgagtcgtgcatcgacgagtgccccgacgacgagctggcgctcgcaccggtgtcgacgcttgccattgagccctgtcaggggtgcgatgcgtgcaaggcgctcgccgcgcgcgccgcaggcggcgaggcggcggaggacgggcagacggacgaggcgccccgccgctgcgtcatcgacgacgacatggcggaggtgtacgagctgatcgacgccgccgacgagctggtcgtggtgtcgcccgtgtacttcgccggcgcccccgcccagctgaaagccctgctcgaccgcctgcagccctacttctggaccgacgagcgccatcgggagaagcgtccggccacgctgcacgtggtgggcgagggcggcgacccgcacggtttcgagccgctggtcggcgtggtgcgctcgtcgctgtcgtgcgccggcttcgccctcgagcgcgtattggactgggtgggcaggatcgacgaggaaggcgagatcacggccgaggccgtcgagcatccgctggcgcccctgccagggcgttccgcatccgcccccgcggcgtccacgccgctcggcgatgccgaatcggccgatgacggcaaggattacgcccccgcctccgtatccgacgccccgtcccgtcccgcgctgcgcctctcgccggaaggcaaatcctccccagcggccggcaacccgcctgcgaagaacgcctcccgcggcaagcagcacgcctccggcaccgcttcgcagggcacgaagcgccccaagcagggatcgggcaagcaaggctcccgcaagccagccgccggcaagcagggccccggcaagcaggccgaccgcccgaagcagggcggcaagcgccgtgggtaagctatcgccgctcgcaagcgcttccgccacgcgcgccgtgctggaggcccacggcctgaccgcgaagtactcgctcgggcagaacttcctcgtgaacgacgccatcctgcagaagatcgtcgcgctggccgaggttgcgcccgtcgacacggtgctggaggtgggccccggcatcggtacgctcaccatggctctcctgcagcatgcgggccgcgtggtgtccgtggagcgcgatcccgacctgcccgctgtgctcgccgagacgctcgcgccctgggccgaccgcttcgccctcgtgcagaaagacgccctcgacttgaccgttgacgacctgcgcgacgcgctcggtcggctcgaccctcccgagaccgcccccggcaagctcgtggccaacctgccctacgcggtggccgccaccgtcgtgctcgactacttcgagcggttcccctcgctgggaagcgccaccgtcatggtgcagaaagaggtggccgaccgcatggccgcggttcccggcaccaagaactacggcgcctataccgtgaagctgcgcctgtacgccgagccggccggccgtttcggcgtgggccccggcaacttcttcccgccgccgcgcgtggagagcgccgtgctgcgcctggatcgccgtccgctccacggtgaggacggggccccgctcgccgcatccacgctcaaggcggcagcaaccatggccgatgcggccttcgcgaatcgccgcaagacgctctcgaactcctgcaaaacctacttcgcctcccggggggtgcaaggggcacgcatcgccgccgccctcccgcagctcctcgagcaagctgccgtcgatccgaaaattcgcggagaggcattggctttggaggatttcattcgcttgggaacggcgctggaggcattgggcgcataaggggcgcgggagacgtagaaaggctccccgtgtgccgaaggcgcctgaatgccgaatggagccgaaaaggtcatagccgattcagccgaaaatagttcctgaacggccggccgtcaacttatggtttgcgaaaagtaacatatccgtgcagattctgtagagtattgaccaaggtggtataatctcgctttgtgatttctgcataacggcacacgcgagaaagagtgagcatggatttagctaaacaggccaaaatcgtcgactccattcatgatacgttacatgacttcgtcggtcaacgcctgaaagtgcgcgccaatatgggtcgctcgaagatcgtcgagagcgaaggcgtgctcatgcaggtgcatccccagctgttcatcttggaggtcgaccgcaagcgcgggcgcacggcacggcagtcctaccagtacgtggacgtcctcaccggcatggtggagctctcccagaacggcgagccgctgttcgagcccttcgtcccggagaacccgctggccgacgcctcgacggcagtcgacgagcgtgaagaggagacggtgctctcctagcgctcctctcacgaaagacgcctttcggaaggcgtcgcaagctgctctcaagacgggcgccgcattgcgcggtgcccgtcttgcatgcggtgcccgcaactcgctgacgggaagagggggcgaggccggtgggggaccttccctacgctgaatgcaccttgccctccgcgtctacgaagtgcgcctccatgatggccggatgcgactgcgcgaatgcccgcccgcgttcgatgcccagcgccagcagcgtggtggagtacccctcggcgtccagcgagcggcgcgcgatcacggtggctcccgcggcatccgtttctaccggcaagccggtttcggggcagagtatatggtggtagaaggcgccgtcgcgctcgaagcagcgttcgtacaccccgctcgtgacggccgaggcgtcgcgcaccgccacggtgcccaccacgccctccttgtcgcgcgggtcctgcagccctatgcgccagggcatcccgcccggcttctcgccatgcgccaccacgttgccgccgaggttcacgatgaacgcctccagcccgtgatcggccagcaggtcggccacggcgtcggcgatccatcctttcgcgatgcctcccacatccaccgcagccaaagggtcttccagctgcgcgaacgcctgtccgcctgatccggtgactctatgtgttttcccgccctccgcggccgtcgcggtcggctcgtcccacacccgcagcgtgcgccagtcgacgtgcgcaagcgcctcgtcgatacgcttgcgttcgggaaccgttccttcgtggaagttccagagccgcacgacggcacccatggtgatgtcgaaccgtccctcgctgtccgcgcaatagccttgggccgcgcgcagcagtgcggccgtgtcggtcgcgatgggcacgggacgccccttcgcggcgttcagccgggcgatatcggagtgcggcagcgtgcgcgagaggcgccgctcgaacgagcgacatgcggcgcgtgcggcagcgtatgccgtgcgacactgctcgggagtgccgaatgcctgcagggtgacgacggtgttgaacgcgtagaacagctccgttgtcattcctcgctcgtcgggacccgtcgtttggacgaattcctccaaggggatggggtcggatgtttcctcgaagctcatgctcccagtataggccaaaggccccctgctggaaggctgatccggatcggtgtgcaacgctgcagcaggcaagcacgaagcctcggctggaaaaaggggaagggccgctgccttagcgggcccttccgcatgcggtgtcgagcttaaccttcgtgcgatgtgcgctcggattctgcgatgctctggcgggtggcagcggcgcattcggctatccggcgcagcacctcgtcgcgcatagcggctacttcttcgggagtgtccgccgtggagaacagcgcttttgcggcttcgccgaaggcggtcaagtcggcggcgccgatctcgggattcgtctgaacgggcatgatggtggcttctctttccataacgtggttggacacaagggctcgcaggttagcgagccgaggacccggccgggtgcggggggggggggggttctttgcatgatctcattttgatcgcccctttccgatgcgggaggccgaacgcgctgtcgcggtgcgacaacgagtcgcctcgatagcgttgctggggtaatgtatcatactacattaatcattaaacgataaatagcgaacggaagccgagttgtagcgaacggcatcggcttgttcggctcgattccccttttgagcaactgcgcttttcgcctgaactgatcgacaaggcataatcgaacctatagaataacggttgacaacgggtgcgtatctgccgcttgctcctggagacggcaagcggctgggggaaggcgcgaggaggctccatgaggttcagagaccaggtggtcgcgtttgatttcgctggcattcccatggtcggcaacatgaatacgggatacgccatcggcctgaccgccgaaggggctgacgtgtgcgagcgcctgcttcgggaagaggtcgcggaaaccgaggtagccgccgtcgatgcggctctgctcgagcatctggtgcgcggcgggttcttcagcgacgagaaaccggccgatgccgtggtgtccgcctacctgcacgtcacgcagcgctgcaacttgaactgtgtgggctgctactcgtatgacgaccagcgcaactgcctgcccgatgccccgctcgacgccatcgagcgcgcgctcgacgagctgacggccgccggcctggccacgctcatcatctcgggtggcgagccgttcctgcgcgacgacctgcccgacattgtggcctatgcgaagcgcacctgcggcatcaaggccgtcaccgtgctttcgaacggcacctgccttgccgaaggggccctggctgcgctcgcgccgaacgtcgactgcgtctccatctcgttcgacggctgctcggcgtccgcccccgcctacattcgggaagagcagcgcttcgacgagctggtggccgcggtcaaggccgttcaagccgccggcatccaggcccacatcattcccacggtgcatgccaggaacatcgacgatttggccgaatacgttcgcctgtcgaaagacctgggcgctactttgaacttcagcctgctcacgtgcgcgcccgacgacgagctggccgccctgttgcccgacgaggaggccctgcgtaagctgggcgcgagcatcctcacgctggacggcggaaagccgctcgccctcatggacgcccccgtcggcctgaacctcacggtgaagaggagctgcggcgccggctaccgtggcgtgagcatcgccgccgacggcaccgtctacccgtgccatatgcttcaccgccccgagctggcgatgggcaacgtctttgacggcacgcttgccgaggcgctggagagcgaggtttccgcacggtgccgcgccctggatgccgccaacttcgagggctgtgccacatgccgttacgagcgaatctgcgggggaggctgtcgagcccgctcgctgttcgcatcgggcagtctggagtcgcccgactcctactgcgcgatgaccctagagttctacgaccgtttaggagcggccatgaacgccgcaatagaaaacaagaaaggaggtgtgtgatatgctgttttacagtgaggttgagccgcgaggggcttgtcctgtcgtagggtttggtggtatttgttttgcgccaggcatttagtaatattttcgcctattacagcagaaaggctctcgtttcgcagagccttttttgtttttagacatgaaccagcaggacggtgaaatgatagtattctcttcgtcgccctacataattgagaggaccataatgctaaatgaggatgcgctcgaaacccaagagtcaatctctagaataaataaagtatgcaaattgatcaatgtggtcttcaaagttattcttgtcatcttttgtgcttattgggttgtcgctattgtgggaatgatttttggggccgcaaataatgactcgtcccaacagttagcggggacgatttttttccagatactcttgttttctacgcatggtgtagtcatagcttttctaatcggggtcttgatagccatattttctgacgcctccaaaggagaatcaccgttcacttttattcaggtaaagagacttcggtggatagcgggcctccttttgatttatgcggttttggatttcttgattactcaaaacaatgctttgcttagttacagtggtatggattctggttatatatcgacaagcgatatttcgattattcaagtaaatcttggtccattaattgcagccggagccgtttacgctttttctttcgtgttcaaatacgatgtcctcctacaagaattctcggacgaaaccctttaggcgccaacgatgtccatcatccttcatctggatcgcatcatggccgatcgcaagatgtcgctcaacgaccttgcggataaagtcggcatcaccaacgtgaacatgtcgcgcataaagaccggcaagatcaaggccatccgcttttccacgctcaacgccatatgcaaagtcctcgaatgcgaaccaggcgacatcctaaaatacctcgacgacgatgacgatcccgatccctccgaagagggcgagggcatctagcgcctgccaacacccgcacgttctatgaacatttcaaatccccatttgacaaacgcccccaataccggcaaaataagtcctcgcgcgagagcgcacataacccgtggggatgtagctcagctgggagagcatcacgttcgcaacgtgggggtcgtgggttcgaatcccatcatctccaccacggaaactagatcgggtcggaagcttgcttccggcccgattttcgtatggaagctctttcttgtccgagggatgtacctattggaatgcctcccaaaatgtggtataagaatagtggtggttccgaaaggagctacttccaagagccgggggaagtcccccggcaatttcttttatgggggccaattgagagagctgtcgatcttcgttgacgagtcaggcgagtttggtccggtctcgaaatactacctgataactctagtctttcatgaccaaagtgcagccatagactctcacctggacaaatatcgacgcgttctgaacgattgcggaatgatggacatagcgtttcacctgtcgccgctcatgaacggccattgcgaatatgcggatctcggtttgggggtcaggaaaagacatctctcgaagttcttagttttcacgcagagtcttcctttcacgtatcaaacattcgcattcaagaagacggggtttgacggagcggacaagctgcttgttcgcatgaaacgggatatcacctcgtttttgttcgatcaccttgaattcttccaagcgttcgataaagttaaagtatattacgatgacggccagcaggctgtcagcgaagtgatccacgaagcaatccgctatacgctgtcgaaagatgcgtacatgtttaaggacgcacatccctgcgattattgcttatctcaagttgcggatttcgcttgcgggatagagctgaccgctttgaagtatgatgcttctgaagccactgctactgatgcaatatttttcggcggctcaaattcgttcaaaaagaactacttgaaaaagatccgcaaaaagagaatgggatagctcgtattcggagcaggccgtatgcgagcgacaagcaaaggacgcgtcaccactttagttactaaggcaattgtgatggtgtgcgtaccttctgggagagcatcacgttcgcaacgtgggggtcgtgcgttcgaatcctgccatctctacagcggagactcgatccgcctggaagcttgctttcgggcggatttctgtaaacgagttggtattccacacttgatcgagcctcccgtcctcactcgtctttgtagaacttgttcaggttgatcgtctcgccttggaacttgatcatcgtccaaatcgcataggactgcacgaccaagatgatcccgacggttgcggagacgaaagacaagagggcctccatgcttggattgggggagttggcggcgaatgcggcggcgtatccaaggatcaggatgacggcgcttgcctttttgcttgctatctcggacgccttgatgcgcaccagctcggtgggcaccgagtcttcggaaacctccctcaagagcaccggggtcccgagcgttctgcgaagctgtttttcctcggactcgccgaaaacctcgagcacgaggaccagcgctcccgcgcattgggcggctatggcaaagatgtgcgccacgttctcggtgttgcccaactgagaatacgagtaccagatgctcagcagcagcacgacaaccgccaccaggctgaatatgatgcaaacgaccttctcgttaaacgaggtcgagaacaacttcgcccgaagcgaccctagtttcgtgacgtcgtcttcctgcgtctgctctccttagccaggggaccggcggtttcgcttcgcaagttgtgccgcaagaatgcaagcgcgccttaaggagccagttgcctccgctcggcattatagcctgatccccgatgcgggtcggacggcgagccgccgttgcatacgattcccaccgacaaagccgtgggcgtccatgcggaagcggcgtacgcgcatcaatgtgaggtcttgccgacgtggcacccgttccgtcgatccgccgccccaagttggacctcttcggaggcgttgcgcccatggcctgcaaagggccgaggcgggtttttccctatcccgcccgtgggaattcccgacgtgggtgcggcggctcagtattccccgttcgaaaagtgtatatttcgtgaaggagagatctattgaaggtcgaagggaggagatgcttgatgaaagccatctttgcgagcaagaagacgagattagggctttccctcacctgcatctgcgttctggtcatggggttggcagcgtgtgcgccccagcagcccagcagcgaagaagcgaacaagggagccgaatccgtggtggacttcaaaatccccgcggcgaacgagaacggcatcatcactgccgatgcgtggcaagaagtgtaccccgacgagtacgccacgtacaagcagaacgaagagaacaaggatccgggcgattacacgcagatctacccgcagatccaaaccatttgggcgggctcggctttctcgaagttctacgccgagccgaacgggcacgtctactcgctgaccgacatcagcgagacggggcgcaaccccaagacggcgaactgcctgacgtgcaagtcgtctgagttcatcctgaagcagaacgccgaccccacgctgaacacctcggacatccacgagatggaggcccaggtcaccgagcctatcagctgctacgactgccatgagaacagcccggccgagggctccaaggccatccgccagttcttcgtgaacgcggtgggcgacgacgcgagcaaggtgcccgagggcgccatgtcctgcggccagtgccacaacgagtacctgttcccgaacgagaacaagtcggccgagaacccgtggaagggcctggccgaggccacgccggagaaggtgctggcgtacgagaactccatcaactacgtcgaccacacgaacccgacgaacggcacgaagcagatcaaggtgcagcaccccgagttcgagacgatgtacggtggcgacatggcccccatggccaagcagggctacagctgctccgactgccacatgggcacgacgaagaacgctgacggcaaggagttcgacaaccacaactggtcgagcccgctcgacaacgaggagctcatcgccaacgactgctcgcagtgccatgccgacatcaaggccgaggtcgccgcgaagcagaaggttgccatcgaccgcgtcaacagcatcggcaacaagctggtcacgctgaacaacaagctctccgagatcgttgcgaacggctcgatgggcgaggatcagctgaacaagctccgcgacctcaaccgcacggcccagttctactgggattgggtcatggtagagaacagcgatggcgctcacaactccgcgctcgcccaggacacgctcaacaagtccgaggcggcggtggatcaagctctggcacagatctaaacgaaacgcgaccggtctctccgccgcgctggagaagggaaggccctccgctttcccttcccggcgtattgcaccaaaactcggccgcaacgggcgtgcctcacacgaaattgggggcaaaacgggctaattccccccaaatgggtgataggcgcatcgccggtcgagggctagtatgcatgaggtaacgtgcctgtgtcgaaggtcgggcaggaaacccgcgagccagccggaacgcacgggcaatcgaggatgcaagaaagggggttatggagatgagcgaagaggaaaccaaagtggaagccgccaccgagacagccgcgaccaaggactccacgaccgatgtggaaaccacggatgaagccgtgaaggcggaaggcgccgaagccggcgaggccgctcccaagaagaaggggaagaagtggccgatcgttgtcggcgtcgtggcggttgttctgattgcagccggtgccggcttctgggtttggcatgagcagccgagcttctgcaatgccatttgccacacgccgatggatccgtatctgccgacgtacgaggcggagccgggccaggcggctgtggacaagtggggcaacgacgttgaggacgccagcggcatgatggccgcggtgcaccgcgtctcgaaggatcagggcggcgccgaggccacgtgcatgagctgccacgttccgacgatcggcgagcaggtgtccgagggcatggcatggatcacgggcaactactactacccgctcgaggagcgcgacgtcgaccagctggtagaggcgcgcggcttggagagcggcgacgagttctgcctgaacgagtcctgccacaatctcacgcgcgaagacctgaagcaggctacgtccgagctggggcagtacaacccgcaccagccgcagcacggcgaacaggagtgcagcagctgccacaaggcgcaccgcgcatcggtgaacgcctgcacgcagtgccacagcgagtcctacgtgccggaaggctggctgacataccagcaggccagcaagcttaccgcgtaaggttcgccagcgccgaatagcgtcctcggacgcaaaccgcataacgaagagggagtccgcctcaagcgtcttgcttggacgggctccctcttcaaaggctcgacgaacggaaacggcaaaccgggccgcatggtcggcgggggtttgcaccgtgccgaacggggaaaacccgcggcaacatggtgaatctttgaattcaccgtgcttccgttcctcggaactttggggtacgtgacaattgatcgtaagactcttgaggaggaggcgagcgtgaacacgaaaacgaagcggcggctcgtggtggtcaccggcatcatcgtcatcgtgctggtcgttgtcctggccgtcgtcgggggcagttcgtcggcgaagtcggtgacgattgccgacatggcgaacgggcagtatgccgaccagaaggtccaggtgtcgggcaacgtggtggagaactccttctccacggaggacaacgtgctcacgttcgatatgtacgaccctgcgggcgatcagacgcagtacctgcgcgtcaagtacgagggaggcgtggcggccaccttcggcaacgacgtcacggccatctgcacgggcaaggtgggcgccgacggcgtgctgcatgcgaccgagctcgtgacgaagtgcccgtcaaagtacgagaattccagcaacgcgctcggcgtggcgcagcttgcggattacggggacagcgttctggacaagcccgtgaaggttgccggcacggtgaaggacggtacgcttgccgcggcgggacagggcgaccgcttcgtcctcgtggacgcggagggcgcgcccgagctgtccgtgctgttcgacgacgcgctgtccgacgaggtgagggacggctccacgctcgtgctcaccggctcgctcaacgaagacgggaagttccatgccaccgaggtctcgctcgctggatagcatgagcggcccggccatctcgtaagcttggcggccgcgcgcgcggccgcaacgaagggaaacctacatgtcaacattcggtctgattggactgctcatctcgtttgcggctgtcgtcgtgtcgatcgtctgcctcgtggcgggcgcgattgcagggcacaagcgtgcgagcggcgtggcggagacgctcacctggggcggccatgtggcggccctcgtgtccgcggtggggctcacggcgtgctgcggcatcctcgtgtactgcttcatgacgggcgacacgtccatcgagtacgtggtgcgctaccacagcaatgcggcaggcgccgatgcatggctctaccagctggcgggcctgtgggccggccgcgagggctcgcttctgttctgggcctggctcatctcgctgttcaactccatggtggccgtgcgcaacctgaagcggcaggagaagctggattccatggcgctgctcgtggcgcagatcgtgctggcggcgttcgtgggcgtcacgctgttctccgagagcaacatgccgttcacggccctggccgcccagtacctcgacgcatcgggcaacctgcgcggcgaggcggcgctctggggcatgaacacgctcttggagcactgggccatggccatccacccgcccacgctgttcgtgggctacgccggcctcaccatcccgttcgcctatgccatcgcggccgtcatcgtgaacgattcctcgaaggcatgggtcgtgcgctcgcaacgttacgcgctgttctcctggctgttcctgggcatcggcatcggcctgggcgccgtatgggcctacgtggtgctcggctggggcggctactggggctgggaccccgtcgagaacgcgagcctgctgtcgtggctcgtgggcgtggcgctcatccacagcttcaccgtgtaccgccagcgcggcgcgttcaagcgctggtcggtcatgtgcgcgtgcctcaccttcgcgttcgttatcgtgggcacgttcatctcgcgttcgggcctcgtgcagtccgtgcacgcgttcgagggcgacaacgtgtcgctcgtgctgttcggcggcctgattgccgcgtcggtgctggccggcatcgtgggcctcatcgtgcgctggaagtcgttcgggcctgccaaggcgggcggcgacgatatctccagcatgatgtcgaaggacgcggcctactacttcaacaacctcatcatgatcgtgttcaccctcatgctcacgttcatgaccatcgcgccggcgctgccgttcaacctgaagttctccacgggaacctacgacgccatcgcgcggcccttgggcgtcctgtacctcatcgtactcacggtgtgcccgctgctgtcgtggggcaagaccgagggcaggcagttctggaagcgcgcccgcatccccggcgcctgcgcgctcgtgctgttcgcggtgctcatgttctacttcgccacgtacctgcttcccagctaccaggcgaacgtcgcgtactaccaggagctggcggcgcagggcagcgtctctgcctccgatatgctgtcgacgttgagccctgcctggtactataacggccttgcggtcgtgggcctgctcgttgccagcctgctgctgttcaactcgctgttcatgctgggccgcggcatccgcgcctaccgcgagaagcacggcggcaacgtgttcggcgccgcgttcggcatgctggcgaaccgcgccgcctcgttcggaggcttcgtgtcgcacctggccatggccgtgatcctggtgggcttgatcggctcttccatgtacgtgaccgagcgcgtgggctacgtgggctacgacgaggccacggattcgaccaccgaggacttcaccatccaggacttcacgctgaaatacacgtcgaacaccatcgaggagatggcgaacggcgacgacatcctgtacaccgtgaactacgacgtgttcaaggatggcgagttcgtgggctccgtgtcgccggccgtgcagctggtgcagtccacgcagcagcagaagctcgtggcgggcgtgatctcgtttcccacggaggacctgttcgtggtgtacaagggcgtgaacaccaacggcgacttctccatggacgtgcgcgtgaacccgctcatcacgcccgtgtgggtgggcttcggcctgctgatggtgggcgttctgatagccaccgctgggcgccgtggcgcgaagcgcaagtttgacgaggagccttccggcgacgatctgccgcacgaggcttcggccgcgaaggtcgagggttcgagcgtggctttcgaaaccgttgccgacgtggttacggccgacggtgtggtcgaggcggtggtcaagggggccgttgacgtcgctctgggttccgcgtcggttgcggccgcatcgaaggccgacgagaagaagagggaagaggcgtaacgcgccatggaagctgcggttgagcctgcgatcaggacgaagaagctctcgaaggtgttcggcaaccgcaaggcggtcgacaacgtgaccatcgaggtgccgcaaggggcgttcctgtccatcttcggcccgaacggggcggggaagacgacgcttctgcgcgtgctgtcgacgctgtcccgcgccacgtccggcatggccacgctgatgggcgtggatttgaaggacgaacccgacaaggcgcgcgaccacatcgggctcatctcgcacaactcgatgctctacccggatctcacggcggagcagaacctcatgatctacgcgcgcctctacggggtggcgaaccccgaggcgcgcgtcatggagctcttggaggcggtggagctgaagcaccgccgcctcgacgtggtgcgcacgttctcgcgcggcatgacgcagcgcctctccatcgcccgcgcgctcatccacgaccccggcgtggtgttcctggacgagccgtactcgggcctcgacccgcatgcggtggagatattcgacgagctcatcgagcagcagcgcgaggggcgcacgttcgtcatggtgagccacgatctgcagaagggcttcgccatgtgcacgcacgcgctcgtgctggcgcgcggccgcgtggtggccttcgacgagaagggctcgttcgacttcgacgagttctcggcgctgtaccgctcgaccgttggcatgggggtggcttgagatggcggccgagaagggggcgcccgtgcgcacggcgggcggcgtggcgctgaagaagccctccacgttccagcagtacaagacgcttctgcgcaaggatttggagcaggagttccgcacgaaggagatgctcacgtccatgggcatctacgcgctgctcgtgatcatcgtgtacggcgcggcgctcgcgcagacctcgcagaccaccgacgtgctgcagatgagcggcggcctcctgtgggcgctcatcgtgttcacgtcgctgctgggcctcaaccgctcgttcgcgcacgagaaggagcagggctgcctggagggcatcctgctcgtgcccatggaccgctcggtggtgttcctggcgaaggcgacgtcgaacctgctgttcctgctggtggtggaagtgatagccgtgccgctgttctacttcttcttcctgaccaccaccacgccctcggagagcttctggctgctggtggtgccgctgctcgtgggcaccgtgggcgtggcgggcatcggcacgctcctgtccaccatcaccatcaacacgcgcggcaaggacgtcatgctggccgtgctgttcatcccgctgatcttcccgctgctctacgcctgcgtgtcggcgacgaccgcggccatcgtgggcgcggaggggtacgcggacgtgatgctgacgtcgctggtgctcgcgggcggctacgacgtgatcatgatcctcgcatcgtgggttctgtacgattttgtaatcagcgcttagcgttccggcggcctaacggccgtcggaactgcccgacgctgcgaggcgccgaggcaccccgccttgccgcttcttcgcttgccctcacgtgcgaaagcacgctcggccgcgaagcacggcaattcggggcacctcaacgcctctcgctgacagggcaggacctataatagttggacgagtagagagaaggggtgttcatgtccgaaaagaaaaaggcgcccaagcttccggaggcggggcagtggcccgaccggattgcgccggcggtgctcgtggcgggcatcgtgctgtcgacggtgggcttgctgctggcgtttttctgggcctcgcccgtgaacggcgccgcggtgaacggcgtcgagatgatcggcgggcagatggtcaccaacgtgctgctgctgtcgcagaagatcttctacttccacatgccggtggccatcacgtcgttcgtggcgctggcgttcgcaggctactacgcggtgcgcttcctcatgacgaagaaccgccgcttcgacacctgctcgaagatagcgatggaggtcgcgcttttgttcgtggcgtgcacgatgatcacgggagacttgtggacgaggttcgagtggggcgtgtggtggacgtgggatccgcgcctgaccacgtacctcatcctcatgctcatcatcatcgcgtacttcatcctgcgcaacgccatcgacgagcccgagcgccgcgccacctacggcgccgtgctcgccatcatcgcgcttatcgacgtgccgatctgcttcatggtgacgcgcctcatcccctcgagcatccacccggtggtcgtgcgcgagggcggcatgtcgggcgacatgggcatcacgctcatgttctgcctggccggcattgccatggtgggcttcgcgctgtaccgcctccgcttccgccaggtgcgcttggccgagcgcgtggaggccctgaaggagcagttggaggactgattggttcccccgttctgccgaacggcagaacggctcgacgctgcggcgctccgcagcaccccgcctcgccgacgttgaaacgacctatgagttgagaaggagattgacctatgaatccggttctcgttgagatttacagcaccgttgccccgtccatgccgttcatcatcggcgcgtacgcgctcatgtgggtggccatcctggtgtacgtgctcatcatcatgttcggcttcaagaaggccgagaagcagatggccgtgctggaggaggccctggccgagcagcagggcaggtagccgtctgatgacggcctgtccgctcgtgctacaatagcccaagcgattttcacgaggcgccgcaggatcgcggcgcctcttctgttgtcggagaagaaaggtttccatccatgaaggctctcattcccgcggccggcctcggcacgcgcttcctgcccgccacgaaggcccagcccaaggagatgctgctcgtcgtggaccgtccggccatccagtacgtggtggaggagggcctggcgtcggccgccgacgaggtggtcatcatcaacagccgcgagaagaaggccatcgaggagcacttctcgccgaacccggagctcgtggccacgctgcgcgcccgcggcaaggacgcctacgccgacctcgtggagcgggtgggcgcctacaacgtgagctacgtgtaccaggacgaggccctgggcctgggccatgccgtgcgctgcgcggccgagaagacgggcgacgagccgttctacgtgcttttgggcgacgtgctggtgcccgacaaccagatgctgccgcgcatgcaggaggtgtccgacgcgcacggcggcgcgagcgttatcgcggtcatgccggtgcccgacgaccaggtgagccgcttcggcgtcatcgcgggtgcggccgtgtccgacgacgtgtggaaggtcgacgcgctggtggagaagccggcgctcgaggacgcgccgtcgaacctggccgtgttcggccgctaccttttgagcgcgcgcgtgatggaacttctggccgacgtggagcccggcgtgggcggcgagatccagctgaccgacgcgctcgacgccgtgctgcgcgaggaggagatgtacgcgctggtcatcgatcccgccgacggcttcgacaccggcaccgtggagagctggctcgaaaccaacaacgtgctgttcgcccgcaagaacggatagcgggcgatcgggcggtcgagcagagcattttacatggaatgaacgcagatcgttatcgtgttgtgacaactgctgtacaataaaccagtttgagtgttgcccgccgccccgcgcggcgggttttcgatagcggcgccaaggagcaaggaaccaccactatgacggacttcatgaacgaatactgcatgcacaccgccacgtgcggcgagctgcgcaaaagcgacgtggggcgcgaggtcgtgctgaccggctgggcctggcacaaccgcgaccacggcggcctcatcttcatcgacctgcgcgaccgcgcgggctacacgcaggtggtcgtcgaccccgactgcgtgagcgccgacgacttcgcgaaagccgagcacctgggccgcgagtacgtgctgaagatcgcgggcacggtgcgcgatcgcggcgcggaggccgtgaaccccaacatggctacgggcgagatcgaggtgctggcgaagtccgtcgaggtcctgaacacgagcgtcaccccgccgtttgccattgaagacggcatcgagacggacgagaccacgcgcatgaagtggcgctacctggacatccgccgcccggagatgttcgaggccctgcacctgcgccacaaggtggcccaggccatgcgcggcgcgctgaacgagcgcggcttcctcgaggtggagacgcccatcctggcgaactccacgcccgagggcgcgcgcgactacatcgtgccgagccgcccgaacccgggccgcttctacgcgctgccgcagagcccgcagcagttcaagcagatgctcatggtgggcggcatcgagcgctactaccagatcgcccgatgcttccgcgacgaggatctgcgcgccgaccgtcagcccgagttcacgcaggtggacatcgagatgggcttcgtgcagggcgaggacgtgatgaacctcatggaggacgtcatggccgagacgctgcaagccgtgggcgtcgaccacgagttcccgctgcagcgcatgcagtaccgcgagtccatggaccgcttcggcaacgaccgtcccgacacgcgcttcggcatggagctcgtcgacatcaccgacatcgtgaagaacacgggcttcaaggtgttctcgagcgtggcgcagtccggcggcgtggtgaaggccatcaacgcgaagggcgcgggcgactggagccgcggcgatgtggagaagctggccgacatcgcggccgagaacggcgcgaagggcatggcctggatcgcgttcacgaccgacggcaaggagaagagccccatcatcaagttcttcagcgacgaggagttcgccgcgctgaaggaggccatggacgtggagccgggcgacctgctgctgttcgccgccgacacttacgaggtggcgagcgccgtgctctccgccctgcgcctgcacatggccgaggcgctgaacgtgccgcgcgagggccatcagctcttgtgggtggtgaacttccccatgttccgctacgacgaggacgagaagaagtacgccgccgagcaccatccgttcacccatgtgctggacgaggacgtggacaagatcgagagcgacccgctggcgtgcggcagctacagctacgacctggtgatggacggcttcgaagtgggcggcggcaccatccgtatccacaatgccgacgagcagcgtgcggtgctgcgcacgtgcggcctcaccgacgaggagatcgaggagaagttcggccacctcatccatgcgctcgagctgggcgctccgccgcacggcggcatcgcgctgggcctcgaccgcctggtcatgctgctgggcggcaaggcgtccatccgcgacgtcatcgccttcccgaagacgagctccgcgagcgacccgatgacgggcgccccgagcgccgtgacgggccgccagctcaaggaagtgaacctgcgcacgctgtagcgcttgcacgctcggcgggaacgcggtacaatcctgccaacggcagcgcccgccagcgcgggtggtgcgtgttatctagttaagccggtcgtccttggtgtgggggccggctttactatttccatcgtcaccattttcaaatcgccttactgcaaagagtgtcttcaacacgatcagccagaaccagaggtcaacctgatcgacaacgagtgttgcgtggatatcgagcatgcccatagcggcaccgtcctttccggcaccacccagcaggcgaacactgccgccaaggaaagtatagcatgatagcattattgtctggcacatgaaggctatgtgcttttggttgcgcgcgaggccgggagagggcgctcgcccccgctttcgactatacttaagcaccgtatgaaccgagtacctcggatgggccgggcggcgccatgttccgaacctggtcaggtccgggaggaagcagccataagggaccgctgacgagcgccctgcctatccgggttactcggttccgtcagtctgacgaccgacggaacggctcgacgctgcgaagggctgtggtaccggaattgcccctttcacgcttgccctcacgtgccaaagcacgctcggccgcatgacggggcaattccggtaccacagcccttctcgctggcatgtccgggctggtggtttggcaacctgtggcactgaagggcgtacatggacatcatcaatttcttcgtcgacctgctcagcgatccgcgcggggccattgcaggctggattatcgcgctgggcccggtgtgggtgtactcgccgctgttcctcatcgtgttcgtggagacagggctcgtgttcttcccgttcctgccgggcgactcgctgctgttcgcggccggcgtgttctcggccgacggcgggggcttgaacgtatgggccacgctcatcgtgttctacgtggcggccatcctgggcaacacgtcgaactactggatcgcgcggttcttcggcactcgcatcatcgactccggcaaggtgaaggcgctcacgcccgagcgcatggccaagctcgaccacttcttcgcgaagtacggcggcctgaccatcgtcatcacgcgcttcatgccgttcttccgcacgttcgccccgttcattgccggtaccggccacatgaatttcgcgaagttcacgctgttcaacgtcatcggcggcgtgtcgtgggtgagcttgttcgtgctggtggggtacttcttcggcggcatcccgatcgtgcaggagcacttcgaggtcatcgtgctgggcatcgtggccgtgtcggtggcaccggccatcatcggcgcggttaaggccgccctgggctcgcgcaagaagaaggcggacgacggacgcacgcaggtccaggccgagatcgacgccgacgtggccgaggagcgggagctgcgcgccgcgcatgcggccgtggccgaggaggcggttgccggcaagcatgcggcccctgcagcggcaggcgcggaggcgccgcgcggcgcgcatgccagggcggattcgaagacggagtagcagggaagcgagcatacgcgatggcagaggcactttaccgcaaataccggccgcagatcttcgaggacgtcgtcggccaagagcacatcgagcgcaccatcaagaacgccatcgagcaggacaaggtgagccacgcctacctgttcacgggcccgcgcggcaccggcaagaccaccaccgcgcgcctgctggcgaaggcgctcttgtgcgagaggggccccacgcccgagcccgacggcacgtgcgacgactgcgtgatgatcgcgaacggcgagcatccggacgtctacgagctggacgccgcgagccgcaccggcgtggagaacgtgcgcgaggagatcatcgggcgcgtgcagttcgcccccacgcgcggacgctacaagatctatatcatcgacgaggtccacatgctgtcgacggcggcgttcaacgcgctgctgaagacgctcgaggagccgccgagccatgtggtgttcatcctggccaccaccgacccgcagaaggtacccgagaccatccactcgcgctgccagcgcttcgacttccgccgcatctcgtcggagtccatcgtgtcgcgcctcggcgccatctgcgtggcggaggacgtggagttcgagggggaggcgctcgaccttatcgcgcatcgcgccgaaggcggcatgcgcaacgcgctcacctcgctcgagcagctcatcgcgttcggcgagggcaaggtcacgctggaggtggccgagcgcatgctgggcggcgtggacacgagcgacgtggccgagatcgtgcgagccatcggcacgcgcgatgtggccgcctgcttccgctggacggccgactacgtggagacgggcgccgacctcgcgcagttcgtgcgcgacctggccgagcacgtgcgcaacatgtacgtgctgacgctggcaggcgccgacgtggcgctggaggtgagcgacgccacgcgccgcgagctggcccacgagatgcagtggttcggccccgataggctctctcggctgctcggcgtgctgggcgacctctcggccgagctcaaaacgtccacgaatccgcgcctgtcgttcgagatcgcgctcacgcgcatggtgcgcccggattccgacctgacgctcgaggcccttgccgagcgcatcgaggcgctggagagcggccattcggccgttgcgcacgtggtgtccgccgcagcgagccaggcccagccggcgatgccggcgggcacgcagggggcgtcatctgccgatgcgcgcgcgggcttttctgcgggtgcgggtaccgctgcctccggggcaccgggcgcggcctccctcggcgcgcacgaaagcgcccgagcagggcaacctgatcgcgcgcgcgcgggcggggagtccccggccgcgcaggcgtctcccgcctcgcacatgccggagccttccttccccgcaagcgcgcaggggtccgccccggtgccgtccggagcatccgcgcccgcaggcgttgccgtcgctgccgatgcggcccagagcgccccgcccgcgcaggccgattccgctgccgtgccggcagcgagcggcgccgcgccctctgccgagctcgccgcaagcctccagaacccggcggcgctccagcgcatctggcaggcgacgctgtccacgctcaagaagaacaaggcggcgtacggcgtgctgttcctgaacacgaaggccctctaccgggccgacaagggcctgttcgtcatcgagtttcccgctgagaactcgttcgccttcaaagccgtgcagaaacccgacgtgcaggacgccgtcctgacggcgctcacgcaggcgtgtggcgcggcgctgccgttcacgtacacccaagggtccgacggcgcgggggctgcagcctcggtcgccgtcgcaatgccgtcggctgcgcccgcagcgtcctcggcgcctgcagcttctgcgtcccagccggccgcgtcggcccccgcgcaggcggtcgcttcgaatccggcagccgccgcgctcgcacgggccgcggcctcttccgtgccggaacaggccgcttccaagacgtcggccgcagcggcctcctcgggcgcccggcatgccgcatcgtcggcttacgcggttccggagcccgatccggcccctgtcgatgcctacgacttccccccgtacgaggacgaaatggttccctacgacgattacggcaccgtcgcctcgccgggcgtcccgtcgcccggcggcacggcggctcccgcggctaccccgggtgcccggccagccgtctcggagccccggccggtcgcgacgtccacgacgcccgatgtcgtcccggcgtctgccgcgacgcccgcgccgcgcccggacctgccgccggagcccgatacgcgcacctcgccttccgtggacatgacggctcccgcgcagtcgcccggagagctggaggccattttggcggcgggtttcggcgatggcgtgatcgtcgaagaagtgagagaatagcgcgaggcaacgaagcaacaggcggcattcgataaacgacgaccgataccgacgagcaaagagcagataggagagcacgatggcgaaacgaggcgggttccccggaggcggcggcatgggcaacatgggcgccatgatgaagcaggcccagaagatgcaggccgagctggcgaaggcccaggacgagatcaaggacatggagtacgaggccacggccggcggcggcatggtgaaagtggtggccaccggcgacatggccatcaagagcatcgtcatcgaccccgaggccgtggaccccgaggacgtggacatgctccaggacatggtgctggcggcggtgaacgaggccctgcgcggcatgtccgaggtgagcgcccagcgcctgaactccgtgaccggcggcatgaacatccccggcctgatgtaggcgcggtcggcagccatgtacgcagcgccgtccatccagaagctcctcgacgagcttgagcgcctgcccggcatcggcccgaagtcggcgcagcgcatcgcctactggatactcaataccgacaaggccacggcgctgcgcctgtccgaggccatcgcggaagtgaaggaccaggtccacttctgccggcagtgcttcaactacgccgaggacgacctgtgcgagatctgccggtcgtcccggcgcgacgcgagcatcatctgcgtggtcagcgagccccgcgacatcccgcccatcgagcgcacggccgtgttctcgggcgtgtaccacgtgctgggcggcgccctgtcgcccatggagggcatcggcccggacaacctgcgcatcgccgagctcatgaagcgcctggcgtcgggcgaggtgcaggaagtggtgctggccacgaacccgaacgtggagggcgagacgacggcggcctacctggcgcgcctcatcaagccgctcggggtgagcgtgacgcgtcccgccagcggcctgccggtgggcggcgacctggagttcgccgacgaggtgacgctcggccgcgccatcgaggcgcgccggccgctgtagctcggacgcgcgaccgagtttccgagcgaccgagcgcgggttttctgctcggggcatgaggaaggccagggcgcgcgtcgtcgaatcgaacgggatggacgcgccgagtccgaacaggcaagaggccgccgcgctctcgcgcggcggcctcttcgcacccaagaaaagacgaagggttctgccccctccaaaaaacagaacccctatctttaccgaagcaacaaagcctctgtaaatgcgggactcagtataccaccctccttcacaaaataacaacactttttttcggcgaaagaacgctctaccgctgaaagcagagggaggcctcgcgcagcagcatggcaagcatgcgtgcgttgaccgcgcagtatgccagcggatgaccggctgcggtcgccgcagcggtcgcgctgcggcggcgatactgcacgccacgggaaagggctccgaaaggagataggggaatgccgggacgggcgctgcgccatgctatacttatgcgccgaaaggacgggtgcatgaacatggtgaacatccccagcccggccctcgctatcgtgggccgccacaactcgggcaagacgacgcttatcgagcagctcatagccgagctggtcgcacgcggctacgacgtgggcagcgtgaagcaccacagccacgtgggcttcgacatcgactatcccggcaaggactcgtaccgccaccgcgccgccggggcgagcgagacggtgatcgccgcgccggggcagatggcgcgcatcaagacggtggagggcgagatggagtgctccgatatcgtgcgcagcatgcacgggcacgacatcgtcatcgtggaaggctaccgcaagagcgggctgcccaccgtggagatcatgcgctcgggcaacgaggcggacgctcgggtggccgacgtgttcgcggaaggagcccgtcgcggctggccgctgggcaccgacttcacccagttctcgcgcggcaccgtgccgcccgcggacgatgaggacgcgcgcgaggcgctgcgccgcgtcatggagggcgacgacgtgccggccgacgcttcggcggtgagcgcccacttcaagacgcagcaccccgaccacgtggacatctccaacaagctgcccacgtcggacacggtggccgtggtcaccgacatcggggaggccgtgcatgcctccaagctgtacaacgtgccgtcgttcgacctgtgcgacgtggccagcctcgccgacttcgtggaggagcactacgtgcgcccgcgtgtgaccgtggtcatccaggcgggcggcgagagccggcgcatggggcgcagcaaggccaccgtgcccttcgcggggcgcccgctcatctgccgcctcgtggagcgtttggcgccggtgtccgacgacctggtcatcaccacgaacgagccggacaacctggcgttcctgcacgcagagttcccgcagtaccgcatccagctcgtgtgcgacgcgttcgactaccgcggcgcgctgcccggcctctacacggccatgcaggccgcccgcaacccctacgtggccgtggtggcgtgcgacatggtgttcgcctcggggtcgctcgtggtggccgaggctctggccatgaacgagtcgggcgccgacgtggtggtgcccgtgaacaagcacggctacgagccgttccacgccctgtaccgccgcatggcctgcctgcccgccgtgcgccgcgcgctcgaccggggcgagaagcgcgcccaggcgttcttcgacgacgtgaaggtgctcgagttcccgcagagcaaggtgttggaggcggagcccatgggcggctgcttcatcaacgcgaacacgcccgacgagctgcacgcgctcgaggagtcgttcttggaaggataggcatgcccaacctcatcgacatcgtggaagttgccgaggccctggagagcaaggccgtgttcttggcgcccgaccgctgcacggtggtgcgcaaccgccattcctcgtgccggaagtgcaccgacgcgtgcccgacggatgccgtgggtgcgaaggacaacgtgctcgccctcgacaacgaacggtgcgtggcgtgcggagcctgcacgaccgtgtgccccaccgaggcgctcatcccgctcgcacccctcgacgaggacctggccgcagcggtggccgacgccgtggtggcctcgggcgggcgcgccgtgttcgcgtgcgcccgcatcgcctcgaagcgcaagggcgacccgacgaagttcgccgaggtgccgtgccttgcgcgcatggaggagagcgtgctgttggagctggcggcccgcggcgtggaggacatcctgctggtggacggcacctgcgcgacctgcaagttccgtgcctgcgtgccgggcatcgacgccacggtggcctcggcgaaccagctgcttgccgcccaggggtcgggcatctgcgtggagcgcgcctcggcgtttccggacgacgtgctgctggaggacgcgcgcagcctgctgggcgcctcgcgccgcggcttcttctcgcaggccaagggcacggcgctggacgcggccggaaagacggtggaggttgccttcaagaagaccggcatggcgaacgcgccgtcactgcgcgataggctgcgcatgtccgatgcgggcacgttgccccagttcaatcctgtacggcgcatgcacgtgctggatgccatggacagcctgggcccgtcggtggtgcccgagatagacacgcgcctgttcggcagcgtgcacgtggacggcgaggcgtgctcgtcgtgcggcatgtgcgcggtgttctgccccaccggcgcgctcaagaagagcgacctcgtgcccgaggaaggggagggcagcttcctggagttctcggcagccgactgcgtgcagtgcaacctgtgcgccgacgcctgcctgaagggttgcctgaccgtgagccccatcgtgtcgaccgacgagctgttcgacttcgagccgcggctgatccacctgccgaatccgcctgcgcgcccgggcatcctgtcgagcttgaagcggtaagccgcgcagggtcgccgacggagaattcgtgcctttcatgaactgtaccttctctttgtacagaacatactgtataagttaggtgaacagttaagcaaaccttcggcgcaggcgccgagtgcgaatgaaggcgggcgggtctacatgaacagcgatttcatcgtggcggtacatgcgctggtgttcctgaaccacaagaagagcgtcgtgtcgagcgaggccttggcggagaacgtgtgcacgaacgccgcccgggttcgcaaggtcatggcgccgctcaagcgggcagggctcgtggagacgcgagagggcaacgagggaggctaccggttcgcggccgacccggccggaaccgatctggcgtccatcgccgaggccctgggcgtgcgcttcgtcgaggcgcgctggcatagcggcgatgccgacaaggagtgcctcgtggcttccggcatgggcggcatcatggatgacgtcttcgccgacttggacgagtgctgccgtgagcgcctgaaacgagtgacggtggcgtctatcgacggccgcatcttcggcggggcgtctgcggcaaagtccgcgtagggtcgcccccccccctttttttttcgcgttcggcttcgtgccgacgacgaccgatgaggagcaatcatgggtttctcgcttgaaacgagcgttccggcgctcaccgtgttcatccagggcctgttgagcttcttctcgccctgcgtgctaccgctcatcccgctgtacgtgggctacctcgccggcggcgcggcaaaggagggcgacgacggcaccatcgagtacccgcgcaagaaggtgctggtgaacacgctgttcttcgtcgtcggcgtcagcttcgccttcttcctgctgggcttcgggttcacggcgctcggccagttcttcacgggcaaccagcgcgtgttctcggtggttgcgggcatcgtcatggcggcgttcggcttgtacatgctgggcgccttcggcaagacgcgcgtcatcgagacggagcaccgcctgccgttcaacttggggcgcttcgccatgaacccgctggtggcgctcgtgctgggcttcacgttcagcttcgcgtggacgccgtgcgtgggcccggtgctggccagcgtgctgctcatggcgtcgtccagcgcgtcggctgcgacgggcttcgcgctcgtgggcgtgtacacggtcgggttcgtgctgccgttcttggcggtgggcctgttcacgggcgaggtgctgcggttcttccgcacgcacggcaacgtggtgaagtacacggtgaaagtgggcggcgcgctgctcatcgtcatgggcgtgatgaccgtgaccgggtggatgaacggcgtgaccagctacctgtcgagcttcggcgccgcgccggcggcccaggagcagccggccgaccagggcgcggccgacgccgagaacggcggcggccccgatgggggcggcccctccgatggcgcttccgggtcggacaggccgtccgggggcggttcggccgacgcgggcgcggcctccaaggacggcatgaggatggccccgaacgccgacctcgtgctggtcgaccaggacgggacggagcaccggctgtccgactaccgcggcaagacagtgttcctgaatttcttcgccacctggtgcgggccgtgccagcgcgagatacccgacatcgaggcgctgtaccgcgaccgcggcgagaacgcgggcgaggtggtggtgctgggcgtggcgaaccccaagacgtccgagcatccgcagaacagcgacgtgggcgtggacgaggtcgaggcgttcatcgacgagtacggcatcacgtatcccgtgctcatggacaccacggggcagctgttctcgtcgttcggcgtgagctcgttccccaccacgttcatgatcgacaaggacggctacgtgttcggctacgcggcaggaatgctcaccgccgacgtcatggacaatatcgtcgaccagaccatttccggcgtgcggaagtagcgttcgcgcgccgcccgccgggttggcgcgacgcattcccgcgcattcccgttctcgggctcttccccttcccgggagctgtgctatactgcctgcaacgctttagcgcagtaaagtagaaaagcggtcgaggggcgcgcagccaggggaggcgtgcgtcgggccgcagggacatgggaggaacgacctatgaagaagaaactcaagggcatcgtcgttgccgcggcgacgcttgcactggctgccgtcatgctggccggctgttcgggcggcggcgacgcgcagaagagcgacgagggcaacgcgggcgacgccccgttcacgctcacggtgggcttcgaccagagctacccgccctacggctacgtgggcgacgacggccagttcaccggtttcgatctggacctggcgaaggccgtgtgcgagaagatgggctgggagctgaagctggagcctatcgattgggatgcgaaggacgcgctgctgggcagcggctccatcaactgcatctggaacggcttcaccatggagggtcgcgaggacggctacacgttctccgagccgtacatgctgaacgagcaggtggtggttgcgaaggccgacagcggcatcaagacgctcgaagacctgaacggcaaggtggtcatgacgcaggttgactccgcggcgctcgacgtgctggagaacgaggaagagggcggccaggccgcgctcgccgctacgttcaaggagctgcagaccatcggcgactacaacaacgcgttcatgcagctcgaatccggcatggtggacgccgtggcgtgcgacctgtccatcgcggcgttccagatggctgccaagtccggcgcctacgtgcagatggacgagccgctgtccaccgagcactacgccgtgggcttcaagaagggcgactccgacctggccaagcaggttaccgatgctctcaaggctctcgacgaggatggcaccgtcaagcagctgtgcgagaagtacgccgaccagggcatcacctacgacaactgggttctgtagcgtttcggcggcccgccggccgccgaaactgctcgacgctgcgaagcgctgacgcaccccgccttgcccctttttcgcttgccctcacgtgcacaagcacgctcggccgcgaaacggggcaatccggggcacgtcagcgcttctcgctgactttgatggacctgtgatgattgagaaaggccggacatggaattcgcaaccatgttggaactgctgggatcggggctggtgttcacgatccagatattcctgaccacgctcgtgggagcgctgcccctcggcatcgtggtggcgttctgccgtatgagcaggttcaagccgcttgcgctcgtcacccgcttctacatctcggtcatgcgcggcacgccgctcatgctgcagctcatggcgctcatgttcgggccgtactaccttttcggcatgcagatgggcaacgactggaagtacatcgcttgcagcgtgggcttcatcgtgaactatgcggcctatttcggcgagatctaccgcggcggcatccagtccatcccgcgcgggcagtacgaggcggccgaggtgctgggctactcgaagttccagacgttcatgaagatcgtgcttccccaggtggtcaagcgtatcctgcctgccatgagcaacgagatcatcacgctggtgaaggatacgtcgctcgcgttcgtgctcggcatcatggagatgttcagccaggcgaaggccatcgccgcctcgcaggtgagcatgcttccctacgtgattgccggcgtgatctactgggtgttcaacttcgttgtggagatcgtgctcacgcgcatcgagaagaagctgaactactaccatgactgatggtcccgccgctctgacgaacagcggaacggccgacgccgcggaagccctcgctgactttggcggacctggaaggagctggaagttgtgacaagcgaacagccgctcgtgctcttggagcacgcgaggaagagcttcggcggcacgccggtgctgaaggatatctcgctctcggtgcgccggggcgaggtcgtggccgtgatcgggccgtcgggcggcggcaagtccacgcttctgcgctgctgcacgctgctggagacgctggacggcgggcgcctggcctacggcgacctggtggtggccgaggaggacgcggacggccgcgccgtctacgcgggcaaggccgcgctcaaggaggccaagacgcgcttcggcctggtgttccagaacttcaacctgttcccgcactacacggtgctgaagaacgtgaccgacgcgccgctgcacgtgcagcggcgcccgaaagacgaggtcatggagcatgcgcgcgccctgctggcgaagatggggctggcgggcacggagaacaaggtgccctgcgagctgtcgggcggcatgcagcagcgcgtggccatcgcccgcgcgctcgcgctcgaccccgacgtcctgttcttcgacgagcccacgagcgcgctcgacccggagctcaccaaggacgtgctgaaggtcatccgcgatttggccgccgagcgcatgaccatggtgatcgtgacgcacgagatgagcttcgcgcgcgacgtagccgaccacatcgtgttcatggacggcggcgtgatagtggaggagggtcccgccgagcaggtcatcaacagccctcggcaccagcgcacccgtgcgttcctggcgaagtacgaaggggagtaggggctctctcgccccgtggcgcgacggcggcttcgaggttcgagcgtcgggagatgaggctccccgctcattgcctatgattgaaagggtcatgggcagaaacggggagtattctcaagatttcggacgggaatcggggaagcgcgcgttcagcgtctgcataacacctgatgataaacttggcggatcgatcatctacgcatcaggataaagaaaactcgggctttttgtccacagcgcgaaacgagggcagagtagaggcgattgggcaccggcggagcggcgcgctgccgattcacgggcgcgcccttcgccgcattgcgggatgccgcgctatactggtggcgtaacctatccggaaagcggggagagacgatggctatcgacagggtgaaggcgtatttgcgcgagcggggcatggaggcacgcgtgctcgagttcgagacgtcgagcgccaccgtcgagctggccgcgcaggccgtggggtgcgagccggcgcgcatcgcgaagacgctgtcgttccatgtgggcgaccgcgtcgcgctcgtggtggccgcgggcgacgcgcgcatcgacaaccccaagtacaaggcgcagttcgggtgcaaggcgaagatgctcgccgccgacgaggccgagccgctcatcggccacggcgtgggcggggtgtgcccgttcgcggtgaacgagggcgtggacgtgttcttggatgagtcgctgcgccgcttcgacacggtgtacccggcggccggcagcgcggcgagcgccgtgcgcctctcgcccgacgagctcgagcgctgcgccgagccctgcacgtgggtcgacgtgtgcaagctgccatgacgggacaggacggtgccgcgcgtgccgacgagcggcatgcggaaggcgccgccgggagatctgcgccccgtgcggccggcctgcttcctgcggcccgcttcggcgcggacggggcgcccgtgacgttctacgtggtgcgccacggccagacgttgttcaatgtcatgggcaaggtgcagggttggtgcgacacgccgctcacggacgagggcgtgcgcgccgccgaggcgctcggccgcggtctggccggcgtcgacttcaccgccgcgttctccagcgacagcgggcgtgccgtgcagacgctcgatgcgctgctgggcgcgcgggccgcgcagcgcggcgagtcgtacgcaccgcccgagaccttcccgcccacctgcgtcccgaacggcccctcgtcggccatcgaatacggcgcgctgcatcccctgctctgcgccgagacgccgtttcccctggcacacgatccgcgcctgcgcgagtggtgctacggcgacctggagggtgagccgggcgagcagctgcgggcggcgcttgccggcgggttcggcgcggaattgagcttcgaggagcataaccgccgcctgcccgaggtggccgacgtgctcgcgcgcgccgacacgtcggggcgcgccgagcgcttcgacgccatcgagcgccgcctgtccggcttcttcgccgaggccggcgaggccgtgcgcttggccggcggcggcaacgcgctcgtggtcacgcactcgttcgtggtgcgcacgctggtgtacctgctggatcctgcccgcgtgaacgacccggcgaagatccccaacgccagcgtcacgcgcatcggctacgacggccatgcgttctccctggccgagataggctccacggactggcagcggtgagacagggggacggggatgacgtctcattcgctcgcgaatgagacgtcatccccgtccccctgcctcaccccgtgccccttacagcttggcctccaccatgtcgatcaattcctgctgcgaatgcacgtccagcttcttgtagatatggtaggtgtgggtctttatggtgtgcggcgatatgaccagctcttccgcaatatagtgctggtttcgcccgcgcgccagcatcgtgtggatccgcgtctcctggttggtcagctcgtacgcctccgcaatctcggcgcacgctgccttccacttgtccaaaaacgcgtccgcctgcggctcgccggactcctccttgcggcttttcacgaggtcccacaccagcagcatgaccagggcgatcacgatgatgatagagaagatggcgtacccggtgtcgaaccccgcctttcccagcccggcgtacagcagcgccccgaccgaccacccgatgaagatacccgcgaaattgccgatggtgggaggcgcgtacgacgcgtacacgggcagctggcggtcgcttatctcgtcggccaaatcgccccaggtaatggcatcgtagcaggtgaacccgaagatgatcagcgccaggaagaagaccttcagcatctccggcacgtagggaaacggcagcaccgccagggcgatgagcggaagcaggagcatgcggtacaggtcggagtcggcctccaccttcttcgacagcacgtacaccgcgaacgccaaagacgatacggcgatcgaggcggcaatcaccaccaccagcccgttccccacggcaaggctgagcacggtataggaggtcacgccgaatacgagcgtgtacaggagggtgcgcggcaacgtggggacgaactcccggaaccgatcgagtaccgcctcgaggtaggctcggtaggacgcggcatcttcgagccgtttagggccgatgcccttgcccgccaagtgcgagcacgcgacggagacggcagggaaggaggctatcatgacgatgcccacgacggggtccatgaacagcggcagaacatacaaaagcgaggccagcaggaatgcgagcgcaatgctgcgcatgagcttggcgcgccgcagccatacgaagaagggaccggtcttcagatagacgaacgaggacgcaagccccccgagggcgaagagcacgcctgcctgcaggaaaccgagctcgcttcccatctgccccagaaatgccggaacctccgccaaaatcgacagcagggcgacgccgattccgaaccaaaggcggtcgaccacgtgctgcaggtaccagccggccaaagcgaagacgaccatgctgagcgcagaggcacccgcaacgatcacgcagagcagaaggtaggcgctgaaatccgccgtggcgaacgggttcagcacgttcgcgtggaatatcgagaagatccaggcccagtaggcggccagcgcgacgatgcccaagatcacgcgtctcgagctgttgccgatgagcaggtcgcgggcgtcgccctcggccggcgcggcgctcttggtagcggggagcagttgcctctcttgagcagtcaacggtcttctcctgtggtctcggctaaacctcgtcatgctgcgcagtgcggcgaaggctgcccaagcctcctttcacccccggcggttcggggaatacgaagccgcagatttcgcaggtcttcgcaccgctcctgctcatgcccaggcaaacagggcacaacccctggcggtaagggggatggcatttcccgcagttacggcacggaaagcaatgttccctcacaacggtaccccatctcgaatcctcgaggtgggcgccggccgaaaccgacgcccaccgttttaacgtgcgtatgcggcctgtcgctattcgcgcgtgctgcggatgctcttattgtagatgcggcggaacacgagaaggcagatcgcgcatgccgcaagggacagcgcgcccatggtcatagccgccgctccgtagccggcgctgtcgaggatcatgccgacgatcgcgggtaccgccagcgtgccgccgttctgtccaagcaccacgacggcggttgcggcgcccaccgtcttcggcgagcgcgcgacttcgggggccattgcgaagaagacggtcggggccgccccgaggaagcacccgaggacgaaggcgatgacgtacgttcccaccacgccgatgtccaggttgaaccacaggaagaggccgattgcgcacactagcatgtcaacgaacagcagcaggcccttgtccttcgtccgtgcgaggaccaggcccatggccgtgccgccgaccagcatgccggcggccgcgatggtcgcgcacaggttcgccgcgccctcggtccagccgttctcgacgctcaggaacgggatggtgaaggagttgaacgcgtcggtcgaaccgccgacgaggaagaacatgacggcgcttaggagggacagcggtgcaaggtagccccacaggaccccgtgcttctcgggatcttccttgacgccggcagactcctccagatccttgcgctcggattcggcgggggccttcacgcatacgaccaccagcaggaatgccagcacggcgccgatgaggccgaacacccacatgccggtccagttgccgttctccatgatgggggtggcggaaagcgttacgatcatcatggcgaagccgacgttcgcgccccacacgccgttggcgaggccgcgcttcttcggctcgtaccacatggcgatgatgcccggtccggcggtcatggccgctccgtacccgcagccctcgagcgcacgggttacgagaattcccaagtcgctggtccagaacaggcctgcgacgttgcccacgatggagacgagcagggcgatgctcaccaccttgcgcgcgccgaagcggtccatgagcgcgccgccgaacagcgccatgaccacggccgcgatggagaacatcgtcatcatgaggccctgggtggtgtaggagatgccgagcacctccatcatgttgggtgcggcgggcggcaccttgccgtactcgaacgcgatgagcacgctggctatgatgatggcccatacgggaatccatgcccggtttttcttactcattgtgtcccctttcttgatggtgccggcgcctcgcggtcgtttcccctcgtgtcgggcgccggcacgagcatcgttggtttagttctccgcctcgcaggagaacagggtctgcttcggcttgcgggcaagctcctttgccaagtcctcgaggtccccgtacttcagaacctgcgcctggcaatgcttcacgcaggtgggctcatgccccttcgcaacgcggccggcgcacaggtcgcactggtcggtgggcgcgggcagatagctgtactgccacgtcttcggggcgtattcccacgggcccacctcgtgcaccttgatgccccactggtcgctcgggtagccatgctcaagctggcaggccacctcgcaggtgtggcagcccgagcaccactcgtaatcgacgagcaatccttttgctcccattgcctattctccttcccctgccggatacatcttgcagatggtgttcttgtagttcgcgccgaagccggaggtgccgcagtcgtagggcaggaggttctccacggtgaggtcccacaggtcgtagagcccctcgtccagctcgcagggcgcctccgggcgccaccaggcgtggtcggtgctcacggtgcgctcgttcacgatgggggtctcgcagacctggcgcttgcagcgtccgtgctggttctccagccacacccagtccccgtctttcacgccgtgccgcgcagccgtgttcgggttgacgtacacgagcggctcgggatgaagggcgcgcaggcgcggtatctggcggtgctccgagtggaacatgctccaaacgcgggcgcccgtggtgagcacgagcgggtattcctcggcgagctccggtgtcgaccgggggctgggaacgggctcctcgtacgaggggagcgggtcgaggcccagggagttgtacagggtgctccacagctcgatgcgcccggttgcggtctggaaaccggggttgccgtcggtgcgcagcaggcccttctcgtgcatgcggtagtcgaacggcgggtagccgggtgccagctcctgcatctcctcgaaggaatgccccgtctcctccaggatatcggagtacatatcctccacggtttcccatggccaggcttcaggcgagatgcgcttgccgatgtccagggtgatctgcatgtcggacctcgactcgcccaggggctctatggccttgttgatggtctcggcgcgctgcgccccatcgccgatgcgcaggccgttgcgctccgcgtacgtgcaggcgggcagaaagtagtcggccagcgccatggccgtcggcgtcatgaacaggtcgacgcacacgatggtgtcgatgttcatatgcgcggcgagggtgcgcttcgcatcgacgccggtgcaggccagcgggttggtggtctgcatccaggcgaccttgatgggatagggttcgcccgtttccaggcacctgatgtagtcgtcggtcacgcattcctggaagcccatcttgatgagcgggtgggcctcctgtccgatgcgcttcgcctcctgctccggcgtgaggaactcggagccccagccggcggcgtagttgaggatgctcgcaggctgctgcatcgtgccgggcttgccgatgttgccggtaatctcgaacagggagagcacggcctgcgccgtggggatggtttccttgatctggtcgatggccacgccccactggaggatggcccgctcggccgctccgatgcgacgggctgcggcggctatctcctctgccgggatctccgtgatctcggcgacctcgtcaagcgggtagtcccgcgcgcgttccgccagctcctcgaagccgtagcaccacaggtccacgaactcgcggtcgtacaggttgttctccacaaggtagttcaccatgccgagggccagcgcgccgtcggtgccgggacggatctgcaggaagagctcggcccgcgcggcgagccaggtgaggcgaggatcgacgacgatggccttcgtgccccgcttcatgcagtccacgacccagtgcccgtacaggccgtcggaattcgagacgacgggattgttgccccatatgacgatgaggtcgggacgctcccactgcgggttgtcgtagcggtcggggaactgctgcgcgtagtcgccgacccaaaacgaccccgaggtggagaagcagccggcgacgcggggcgaatagcacgactgccccgacatcatgaacacgaagttggggctgttgaacccccagcacaaacgcgtgatgtactgcccgatgtcacggccggtgccggagtagaacgccacggattccgggccgtattcctccttggcggcaaggatcttcccggcgatctcgtcgagcgcctcgtcccagcctatttgctcccactggttcttgccgcgattctcggggtcgcgcttcaggggatgcaggatgcggtccggggaatagacgacctcgggcaggtcgagacagcggacgcacaggcgtccctggttgaaggggttctccggatctccctccactttgacgagcttgccgtcgtcatcggtgtacagcaggaccccgcaccccaggtggcatcccggtgccgaccagccgcaccccctggtcacgtggagcccgtcttcttcgtagcgataaggcttcttgtgctcgacggtggtgtagtcttttttctctgccatcacactccctctccttccgtctccccatgcctgcggcttcgggctcggcgtccgcccgaggcgggatgcgccaggccgaagccttcgggcacaccatcccacagcggcgcgtggcggaaaatcgggtgcggggcgtaaagaggggtttcgagaggtgatttatgtatgtctgccctcctcataccatcggtatgaggagggcagatgttcttgaacgtgcaggtcagatgcgtctacttggcgaaggggccgtgccaggcgaagcggccgaggctcgcgggcagcccgtcgcgggtggggccgtggtggtgtccggaggcgggatggaagcccttgccgcgcgcctgcccgcgctgcgggtcctgcgcctgctgagcctcttggcggccttggcgcgcttgcgctccctgcccgttttgctcgcgccgcccatccgatgctccgtgggctgcggacgagccgtgctggcggaacatcgcgcacccgagcgtggccgcgcgccagccgcggcctcctccgcagggatcctgcgggcgcgccgtctcgggccatggctcgggctcgtggtcggttccggaatcgccgccgcggtagaagccgcgcttgccgtcgcgtccgagcgggtgcttgcgctcgtagcgcttgccgccctttccggatgcgccgccttcccgctgctccgccttcttcttgccgtcgcttccatcgcggccgtccttgccttcgccctgctccttgcccttgccgttgcgtgtgccggaagcctcggttccctcgtggtcaagcgggtgcttccgcttgcccatgagccattcgccggcggagagctgcacgcccatgggcatgaagcgcacggagacggcccccaccttgttgtaccagccggtcacggcgcacagctcgccgcgcatgagcgcacggtacacgcggatggccgtctcgtcggcgtccatggagaagtacttccaagcgggcgcgttctggatcccggcgttcttcgcgaagttcgtgcgcgtggcgccggggcaggcggtggtcacgctcacgcccgtgccgcgcagctcgcgggcgagcgcggtggagaacgacagcacgaacaccttggcggcgccgtagagcgcgttgtaggggcagggggtcttcgccatcatggagctcatgttgaggatgcggccgtggccgcgttcgagcatgggctgcaggaacacgcgcgtgagctcggccaggctcgtgacgctcacctggatcatggcgcggatgtccgcgactggcaggtccgagaactggccggcggggctgtaccccgcgtcgttcacaaggatgtcgatatccttgcccgccttgcatacgcgcttgaagatggtgcgcgcggaatccgggtcggacaggtcgcaggctacgggcagcacgtcgacgccgaggatgcgcagctcctcggcctgcttctcgagagcctcctcgtcgcgggctacggttacgagatcgtatccgtcgctggcgaacagcaggcacagggattcgccgatgccgctcgtcgcgccggttaccaaagcggtttgggacatagtggtgctcctttcgatcagggcggcgggagccgcatgccgcggcctgcccggcgtccggacgtttgccctcgcatcataaaagcgcccagccggtccgttccggacgtcggctgggcgttgcgaaggcgcgacgcgcgcgccaccgccgcgaaatgctcggtgcgcgggtcaggcttgcgcgctgggcgcctctgcctcggctgcggaaggggacgcctcgtcgaggcgccgcatgcccttcgcgcccacggcgagcacggtgatgacgaaccagcacgccaccaggccgtaagcggccggcgcctcgccgaaggccgtcacagctgccgaggtggcgaacacggccatgggcgccgctaccatcacgagcgagttctgcgtgccgagcgcgctgccgcggtcctgctcggggatgcggtcgagcatgaagaacccgaggagcgccgaggcgggcccggcgctcacgcccaggagcaccgcgccgagcagcatgacggggaagtcgggcagcgtgccgagcaccgccacgccggccgccatgcccgcgagcgagagcaggtaccacgtgcggcgcgcgaggcgcggcgcgagggcggcgtagccgagcgagctggccaagaggcccagcgacatggccgacagcacgtagcccagaagctccggccggccgagctcggtgaagtgcaccggcagcacgagcccctggaacgatcccatcaccatgatgatgccgaaggagagcagcgtggaggccgtgagcacgccgtcggtgcggaagagcacgcgcgcgccggtgcgcagggcgtcgagcgcggacgccacggcgctgcggccctccgacgcacctccgtcccgacgcaggccctccgcgcccaccgagcgcggcaccgtgcaggtgacgacggcggctgcgaacgacagtgcggccgtgaaccacagcgacgtcacgccgcccaccgtgccgatgaggaacgccgcgacggccggccccacgatggtggtgagcgagtcgagcgactgggtgaggcccatgaaacgctgcaggtcggccttgtcgcgggccaccacggcgggcagcagggcgtcgcgcgccgtcatgccggggatgtcgccgatggctcccagcaggccgagcgccacgaaccagccgaagttgaggccccacagcatatcgaccacggggatgagcgcgacgctcgccgcagagacgaggtcggacaggatggagatgtcgcgacggttgaagcgatcgagggccgcgccgcccacgataccgatgaccatctgcggcacggcgcagatgagcgcgagcgtgccggcggccagcgcgtcgccggtggtggccagcaggatgagcggcagcgccaccgcggcgatggagttgccgaggagcgagagcgcgttcgatgccaaaaagcgcggcgcgatgcgggtcgggtgcgggttcgtgtgcatgggaggttcctttccgtttccgtcagaaaggaagtaaaaactacgacgttgcgtcggggtcaagcgagctgtggtggaattatgagggaggtccgcgcttgcgagcgaacgaagactcgcctacggggaacaccttgaggctgtcgttagcgaatcgaaagatcccgtgcggtttcgccatcttcgcccgtgggatgacgcccgctcccccgatgacgatcgccgaggacggcccttcgtcgaaaacccctctccgagtcacagtaatcaccgctgtgaagcgttttggcgggtttcagtgctcccgcgcgtgcactcgcggctttcgcaagagcgtttcccctggtcgggaaaggcaaggatgggtcaaacactccttgcgagcttcacagtggtgatttctgtgcatccgagaccccgaaaacgcgaagaaccgcgtccggccggagtccaattgtgggtaggcgccctttgccgttaaagcgaccctttacagtaaagggtcgcttttcagcacgtgggaccgttggccttctttgcgggcgaggatgcgggatttcatctcctcttccaggcgatcttccgcatagagttgagcggggttcagacccttgcgcataagctcgtcgacgaagcgttccagctcgatgtcttccggattggtcacgtcttcccagttggcggaatcgaggcagtcgatgaacgggccgatcatatccagcgcttcctcgacgagctggtcgagctcctcgcgtggcgtatcggcgggcagcttgtcgaaccgatcgctcatcgccttcatctccccgaacaagccgagttggtggattttctccatcacgcgctcgagctcggcggtgtcggactcggtgtagagatgccccgtgatgagcagggcttcgcgctcgccgctggtgatggctccctctttgtagtcgatgagcgtccgcaccgcttgcgcgaaccgcaccggtaggtcggggtcgagccgctcggcctttagcagcgcgatcgtgcggcgctgctcctctaggcgctcgatctgggcggccagctcgcggtcgagctcgtcgagggcgtcgtcggcacccgcgccggccgcgtgggcggggctcgcgtccatctgctcgagcacctcgccgatgcggtcgagcgagaacccgagcgacgcgagccgtttcacgcgcagcacgcgcgcgaggtcctccgcgccgtagtcgcggtagccgttctgtccgcgcggcggctcgggcagaaggccgatggcgtggtagtggcgcagcgtgcgcaccgtgcaaccggccagtttcgcaatctcgctcgacttcacaggacgcccccccggctatgggcgcggtgcgcgcaccatgcagcgctccaccaggtcgaatcccggcgcgcctcggcgctcgaccgtctcgaagccgaagtggccgtagatctgctcgaggcggtcggtgtagcaatcgaggtagcagcgcaagccgcgcccatcggcctcgtccagaaacggcgtgaacaggcggcggaacgcgcccgtgccgcggcgggcgggatcgacgccggccgagatgaagtagatgaaatcctcgtcggcccgtgcgcgctcgagcggccagctggtggaggaggcgaggtccatcgcctcggcgcgcggcccgaggaccgcaccttcctcaggcgtgagcgtggcggccatgagcagcgtcgacttctcctccagacgctcccagccgccttcgggaagctcgctgcgcaggtagacgttcgcggcccccgcacggtcgggcagcgcgtagacgcactggtacggcgcggtgacggcatagtccgaccggatggcggcctgcgtgacggccagcttgcgctcatcgctcatgccgggcacgtcgagccaggtgacataccacatctcctcgaggaagcacgtgcccaccatctgggcgagggcgtcaagctcgtcggtttgctcggggcgcagggtgtcgagtccgggcaggttcatgatcgatcctttgtcgcgattcggtttcggttcgccctcgattctcgcatgacttcccgtccctgtcgagccgcgctgcacagcgcctccataccgacacccatggcgcggccatgctgcaatccggcagcaccgcttcttttgtcggaccgaccgcccatccgacgtcgcgctttgcgcgcgttcccgcctgcgcaacggttggttgattgcgcggcaacggcggtgttgcaaacggggctggctccccgggaggcggtgcgccgtccggcagaatcgttcccgttctctctagaccattcggcttgaaggaggcccgtcgctatgactgccaaagattttctcgacaccaacgatttcaccaaagaccagctgctcgacatgatagagctttcccgcgtgctcaagcgctgcgtgaaggccggctactttcccgaactgttgaggcacaaggcgctcggcatgatcttccagcaggtgtccacccgcacgcgcctgtcgttcgagggcgccatggccgacctcggcggcgacgcgcagttctacgcgcccggcaccatccagctgggcggccacgagaccatcgaggactccgcgcgcgtgatggggcgcctgctcgacgtcatcatggcacgtgtcgaccgtcacgaggacctcgtcgagctggcgaagtactcgcaggtgcctgtgatcaacggcatgtccgactacaaccatcccacgcaggagatgggcgaccttctcaccatgatcgagcatctgcccgagggcaagcgcatcgagaactgcaagatggtgttcgtgggcgacgccacccaggtgtgcgtgtccgagatgttcatctgctcgaagatgggcatggacttcgtacagtacggccccgaggggcaccagatccgcgaggacctgcttgagatcggccgcaagaactgcgaggagtccggcggcagcgtcaccgtcaccgacaaccgcgaggaggccatgaaggacgccgacttcgtgtacaccgacgtgtggtacggcctgtacgacaaggagctgtctaaggacgagcgcatggccatcttctacccgacgtaccaggtgaccgaagagctcatggatatggccgccccggacgccaagttcatgcactgcctgcccgcctcgcgcggcgaggaggtcaccgacgaggtcatcgacggtgcgcagtccatctgctgggacgaggccgagaaccgcaagcactccatccgcggcctgctggcgtggttctgcccgcaggcgaaggtcgacgaacccgaggccgatgacgctcgcgagcagctgaactacctgctggagggccttgggaagcaaggggttccgacggcctgacggccctcggaacgagtcgatgctgcgggcagccgcggcgcccgattctcgcgcgatggcgcgggctcgcgtaccgaagcacgcgccgcccgcgtcattccacgaatctgaagcatcgcggctgccctcgctgactgactacgccaacctgtgcgtgaaagaaggaaacctatggctaagaacaagaaattccgccttgtcgacgcgatcctgtcggtcatcacggtcgtgttcgtggcggaggcggcggcgccggccgccgctatcggcaactcgcagttcttctggtggatattcctcattgtcgcattcctgctgccgtacggcctggtggtgagcgagctcggcaccacctacgacgacgagggcggtctgtacgactgggtgcgccgtgcgttcggcgacaagtggggcagccgcgtgagctggtactactggatcaacttcccgctgtggatggcctcgctcgcgttcctcttccccgagaccatcgccatgatcacgggcatggagatagggctggtgccgtcgctcgtcatagagctggcgttcatctggatcgttgtgttcctcagcttctcgaaggtgtcggactcggcgtggatcctcaacctggcggccgtgctcaaggtgggcatcgccgtggtggtgggcggcttgggcatctggtacgccgtgaactacggcttcgcgaacgacatggcgccggccacgttcctgccgtcgctcgactcgaacagcctcacgtacctgtccatcatcctgttcaacttcatgggcttcgaggtcataaccacctacgtgggctccatggagaaccccagcaagcagattccgaaggccatcatcgccggcggcattgccatcgcggcgctgtacctgttcagctcgttcggcatcgcggcggccatcccggcgctcgacatctcgctcgactccggcatcatggacgcggtgggcatcatggccggcgtgggcagcgtgctgttcgtcgtggtgggcatcgtgttcctcatcacgctgttcggcaacatggtcagctggtcgttcggcgtgaacttcgtggccgagcacgccgcacgcaagcagaacatgccgcatgtgttcgcgcacgagagcaagaagaaccagatgcccaccggcgcggccatcgtcaacggcatcgtggccagcgtgctcgtgctgctgtcgcccgtgatggagctggccggcttcgacggcttcttctggatcttcttctccatgaacatcgtgttcctgctgatcagctacattcccatgttcccggcgtttttgaagctgcgctcggtcgatccggccgcgaaccgcgtgttcaaggtgccgggcgggcgcggcgtgctgctggtggtaacgtggctgcccgtggtgctgctcgtgctgtccatcatcgccaccatcgtgccgctgaacggctccgaggccgagatgtcgaagatacccatgctcatcggcgtgatagcgttcgtcatcctcggcgagatcgtgcgcgtgtggtcggcccgcgggcgcgacgaccactacggcggcatgggcacgcacggcgatccgttcgcctacgacgtggcgcacggcttcgaggaggagcccccctccgaggaggtcgccatggaggaggacatgctcatcggccgcgagccgcgcgatctggtgtagcgcgccggccttgcggggcgctccgccgcgcaggcgcacgccactcgcgcgggcgccctgcctcggcgagggacgcggctcccaaggcgcggctctcgcctgggtgtggcgccccgccccgcacctgctatgttgtaacgacgttcgaaaggacctgacctatggaaaccatttacgaagagcagtccaccccgaggcaggacggctaccgcatgcccggcgagttcgagccgcaggagcgcatctggatgctctggccgcaccgtcccgacaactggcgcgacggcgcaaagcccgcgcagaaggcgttcgccgaggtggcgcgcgccattgcccgcttcgagcccgtgatcatcggtgcgaagcccgaggactacgaggccgcccgcttcgagatgtccgaggatgacaacgtcatggtcatcgagatgacctcggacgactcgtggatccgcgactgcggccccacgttcgtgaaaaacgacgacggcgacgtgcgcgcggtgcactggcacttcaatgcctggggcggcctgtacgacggcctttacttcccctgggaccaggacgcgctggtgggcgtgaaggtggccgacctcgcgcgcgccgtgcgctaccgccccgacacgttcgtgctggagggcggctccatccacgtggacggcgagggcaccgtcatgaccacggagatgtgcctgctgtcgccgggccgcaacccggagctctcgaaggaggacatcgagggctatctgcgcgagtacctgaacgtggagaagatcatctggatcaaggacggcatcgaccccgacgagacgaacggccacatcgacgacgtggcgtgcttcgtccgccccggcgaggtggcctgcatctggaccgacgacgaggacaacccgttctacgaggccgcccatgccgcctacgacacgctgtcgcaggccaccgacgcgaagggccgccagctgaaggtgcacaagctcaccatgccgaaggttcccacctatatgtcgcaggaggaggtggacgccatcgacgtggtggagggcacgctgccgcgcacgaccgacgattacgccatcgcctcgtacatgaacttcctcatcgtgaacggcgccatcatcttcccgcagtacggcgacgagtacgatgagttggcccgcgagcaggtgcaggccatgttccccgaccgcgagatcgtgggggtgcccacccgcgagatagcctacggcggcggcaacatccactgcatcacccagcaggagcccgcccgcaggtaggttccgcagctagaagcgcccggccgaccccgtctgactcgtacaggcggggtcggcgcctttaccgcagcaccacggcctgcgcgcccagggcgtagtagcgggcggcgaacgtggccaggggataggaaacctggccggccagggagtcgctgaccagcacggtgccggcgtccaggtcgtagccgcgcaccaccacgcaatggctgttcgtgacaaggcggtacgtgcggccttcttcctgcgcggtgcggtagcacgcgccgggctcgtccaggccaatggtgcaccatacgacgacggggttgccggcggacgcctgggcgagcacgtcgcggaaggccgcacctgtcaggtcggttgcctcgaggctggacccgtgggcggccaggtaggccgacgccgcggccgcgatggcgggggccatgcaggagtgcccgttgggggaggagggatcgcccatgaaggcgtgcacgaagtcgtcggcgctcgtgggcagccactcctgggccatctcggtcttctgaaggacgaagccgcatgccagaagcgcgttcgtgagcgctaccgactcgcagccggtggggagctcggggtactgctgcagggccggcacgtcaagggacgcgctgcgcgggagctcggcggcggcctgcagctgggcggcttcggcgctggcccgcgcctcgaggtccacgtcggccgccgccgaaggcgaggtcgtgagcggcagggcgagcgcaagggccagcacgagagccgcagcgccgaagcaggcgagggccgccttgcaacgtgccaggacgcttcccgcccgcgccacgcggctctgcgcgaacagcggccgggaacggcgggcgccttcgacgcaggggcggcgccggtacggcgtggtgccggggaaggtattctggcgacgggtcggtcggtacggcataggtgccccttcgagcggtttcctttggtgccgaggttagcgcccgaacttgaaagcaagctgaaagaacgggcgaacctgcatgcgcaccatcacggctcctcggttaccgagccgttaccaagaacacgcgcgaggaagccgaactgtttcgccggccgcggaatctcctcaatttcgtggatcaggcgcgggcgcgccccgaggagcggcccgagccgccctgcatgtgcgccctaggtgcagcccgccctgcgcacgcgctttgggtagtccgcgctatcttgcaagcaccccggcgtcgtttctctgcttgccgcataacctccagattttcgataggcccgcgcaagaagggaggtgcgtttgctacccttgcgttgtcgcatcgggactgctgcttcgcatcctgtgcgagattttttgaaaacaccccttgaccctccccgtgcaggaggctgttgaatgcgatgagaaggaggtgagaaccatgttctacatcggagagttctcgaagatgggaaagaccaccatcaagacgctgcaccactacgaccgcatcggacttctgcgcccggccgccgtggacggcgcgacgggctaccgcctgtacaccacgtcccagctcgtcgacctgcaccgcatccaggcgctgcggcaggcgggcctgtcggtggacgaggtagccgccatcgagggcggtgccgacccgcgtcccatcctcgcacgacgccgtgagctcgtcgagcgggaactcgccgcgcgccaggaacgcctcgcgcgtatcgcattcatgctctcagacgaaggaaaggggttttccatgaactatcaagccaccatcaaggacctgcccagctgcatcgtgttctccaagaccatgaccgtgcccgacttctccgcgtacttcgaggtgattcccgccctcggccgcgccgtgaaggaggccaacccgaacctcaagtgcgccacgcccgagtactgcttcatcacgtacctcgacggcgagtacaaggagcgcgacatcaccatcaagtacagcgaggccgtggaggagtacggcgtggagtcggaagacatcgtgttcgaggaggcgccggcggtcaccgttgcgtccgtgatgcaccgcggttcctacgccgacctgccgcgcgcctacgcgttcgccatggactggatcgagcagaacggctaccgcgcgtccggcctcgcccgcgagagttacatcgacggcatatggaactgcgccgacgagtcccagtggctcaccgagatccaggttcccatcgagaagaggtagcgtgtgaccggggcgcggaacggccgccgcgccccggcttgcgctctagtcgtcgagcagctcgaacccgtagcagtcggtgtcctgcgtcgtgtggaagatgcggcgcacagtgagcgtgtcgtccgtgcacgtgtagtacacccagtagcgcttcacgagcttgcgccggtaggccggatgctcgaggtcctcgtcgaagaacggctggccgagctccggcatctcggccgcgcgctcgatggaggcgaagatcgcgttggcggtgtcgcgcgcagcttgcggcgacttcaacgtgagcgcgatgtaagcgagaatgccgtcgaggtcggcgcttgcgcgcggcctgaactcaatctcgctctcgcgcatgaagttgctccgccgattcgatgagcttgtcaacgcgcgtcttcacttcgtcgaagggaatggcggccggccgatatttctcctcgatctccgcttcgcgtagcttgcgtacggcgcgctcatggcgcaagtgctcgtcgtaggcctcgctgtcgatgacgacgagcgaggccgcgccgtttttcgtcatgatgatgggctcgcgcgtctcgcgcgccagactctcgatatcgttcaaccgtgttcgcaagtcgctgatgggccgtatctgaggcagtgcagcctgcatgctcatggacgtcctccttgttataaataagtaacttatttataacataataaaagactgccagcaagcacgcatcgtcttaccggtggaccccccacccgaacagcccgcaacccgctccccagtgacgcagagcacgcagcttgaccccctgcgaaagagtccaccaccctgccggtcggcgccccgcccgtgcagcgcttctcgcacacttcgcgaaagctcggcgtgctgcacgggcggggcgccgaccggcagggtgcccacgccccctatttcatcagcatcttcagcagcttcatcttcgtatcgtcaaaaggcgggttgcggatgggcatctccagccacgtgcccttcttgagcgtggacttgtagtgggtgaagcagtcgaagcccaccttgccgtggtaggcgcccatgccggagttgcccacgccgccgaagcccatgtggttgttcgccaggtggatcaccacgtcgttcaccgtggcgccgccgaagggcaggcgcgtgagcacgcggtgctgcacctgcttgtcgtcggagaacacgtagcaggcgagcggtttctcgaaggcgcgcacgatgtcgaaggcctggtcgagcgagcggtacgtgagcacgggcagcaccggcccgaatatctcctcgcccatgatggggtcgtcgagcgtcacgccccgcaggcacgtgggctcgatgcgcagcgtctcggggtcgccgtggccgccgaacgccaccgtcgcgttcggattgcgtcgctcgatgagtcccataacgcgctcgaagtggcgctgcgagatcatgtgcggccactgctcgcacgccaggatgtcctgcccgtagtactgatggaagcacgcgtcgagctgcgacacgaaatcgtccacgacgttctcgtgcacgaggaagtagtcgggcgccacgcacgtctgccctgagttgatgcccttgccccaggccacgcgttgggctgcgcgcttcacgttggcggtctcgtccacgatgcaggggctcttcccgcccagttccagcaccacgggcgtgaggtgcttcgccgccgcctccatgatggtgcggcccacgcccgggctgccggtgaagaagatctggtcccagcgcacgtccagcagccagtcgttcatggcgccggaaccggggaagccgcatacgaattcgggcgggaacacgttcgccaggatatcgatcagaagctcgctcgtggccttcgaggtgcgcgagggcttgagcgccacgcagttgccggccgcgatggcgtccaccatcggcacgagcgccagctgcacggggtagttccacggcgagagcaccagcacgacgcccagcgggctcgggtacaccttcgacgtagagtggaagtgcacgagcggcgtgggcacccggcgcgggcgcgcccacttggacaggtgcctcacgcacgtgttgatctcgtcgtagacgaggccgagctcggtagcgtagccctcgaacgcggcttttcccagatcggcgtgcagcgcctccaggatgcgcgcctcgttggccttgaggtaggccttcagcttcacgagcgcctcgcggcggtagtcaacctgcagcgtggcgcccgtctggaagaaggcgcgcatccgctgcgcggcggcttccacgtcggcgaggcttgcgaaggtggggatgttggtcatgctcgtgcctttctcgttaccttcgtagggcaagggctctgtccttgccgctcgacctgcgatggcgtcccctattgactgcaagggcagagcctttgccctacgggggaacctgcctagtacgttgcttccaggatctcgagggcgtcgtccagcgtgatctcggcctcgttgtacagggcggcgccgtcgtagcgggcctgcctcgccacggcgggaagctggtcgtgcgccacgcccagctccgacagcttgagcggcacgccgtactgctcgtggcagtgctcgttcatggcgaacagcgcatcgcagaaggccaggtcgcgctcggctggcatcgcctgcggccccagctcggccgcgcgcgcgggcgccaggtgggacagcagctcgccgtaaagcccggcgtgcacgccatggtagaggttgaagcgcacgcagtggggaaggagcatcatcatggcctggccgtgcgggatgtggcagaggccgccgagcgagtgcccgagcgcgtgcacgatgcccaccatggcgttgctgaacgccgcccccgccatgagcgatccgagtgccaggctcgtgcgcgcatcgacgttcgcgccgtcgcggcaggccgtgggcaggttggccgcgatgagctcgatggccttcaccgcgaacgcgtcggacacggggttcttctggatggacgtgtacgcctccacggcgtgcgtgagcgcgtccatgccggtggtggccgtgagcttcggcggcagcgacgccgtgagcgccgggtcgaggatggccgcgtgcggcaccagcttgtaggacgtgaacgagagcttcgcatgcttcttcgtgtcggccaccacggccacgagcgttacctcgctgccggtgccggcggtagttggcacggcgatgaacggcggcaggtcggcgtgcaggatctccgagccctgcaacgtggcgaagtccacgccctcgcaggcgagcgaggcggccgcgcccttcgtggtgtcgatgaccgagcctccgccgatggccacgaacccgtcgcagccgcgctcggcgtagaggcgcgccacctcgttcaccacgtccatggacgagtcgggcggcacctggtcgaacacctcgtaggccacgccggccgcgtccagcacgtcggtgagcttggcggccacgcccagcttcaccaagcccgcgtccgtcatgaccagcggatgcaccacgccgcggtcggccagctcatcgggcagcttgtccagcgcgtgcgaccccgcgatgatcttggtggggcagcagaattcgaatgctttcacggcttctccttcggcttctcgggaaaacttgccacagcctccgttcttgtccagcgccatgagcaggtcatatgctgcatctacgcaggtcgaacgcttgcgaaggtgcggccgaaaacagaggctgtggcatgttccggggcaccgtctccctttctcctacggcgttgccgccgtcggtctgcgatacgcgcgccgccagccgaagaacatcttcagcagcgccgtgaacagataggtgagggccacgcccgtgtcgttgggaccgcgcgtggagaacgcgcgctgcgcgagggcgtccttcagcgtcaggccgcccgaaaagcagccgaacgcataggccggcgagcggaagtcgatgacgtagtccacagccacggcgtccgcatcggcgctggccagcccgcttcccggctcgacgtcgcgggcaacgcgcgcgggcggaatgcgctcgaacgagccgcggccggtgcggcggcatgtgcaggccaggtcggtgccgcgcacagacagcatgaacgtatagcccggcgccaggtaggccacctcggcgcggatcttcggcgaaacgtgccggagcagcgttatcaggtgcggcagcaggcgcagcagcacgcgtacgtacagcgcttggaggcgttgggcggcggttcgccgcggaggcgtttggtcggacatgggcgctccttgcacatcctcgatgacgatgcctctcatgatagcacgccccttctcgcatctcctgcgcggcccgccccgcggcctgcgtcagccgatgtacgccctgtacaccaaacggtgtaattccatgacgcgaagatgacaattgcgttgaaggaaacctgatcaggaaccacgcgtgatatggtaggcccatcacctacctaagcgaagcgatcatcgaccataacgatacccaaggagcgtgaaccacatgaccgatatgcacggcaacacccccgccggcggctccgtcccgccgactccgggcgacgagcatgcccagcattcagcccaaacggggcagcagccttactaccagcaaacctaccagccgcagcacacgcctggccaggtgacggttgagaagaagtcgcacggcctgcgcacgttcctgctcgcgttcgcgggcgcggctctcgcctgcgtgatcggtttgggcggcttcggcatctggcaggccgctaccggtgccgacaagggcggcggctccgactccggctcgtccacgcagctgggctcgcagagctccggcagcatcaacgccaccgacgccgaatccgaccagacgctggccgaggccgtggcccagaaagcgctgccctccgtggccgccatcgacgtgtacgcgaaccagtccaacatgggcggcatgtacggcttcggcggcggttccaactccggttccggcagcacgctcacgcaggcctcgctcggcagcggcgtcgtgctcaccgacgacggctacatcatcacgaactaccacgtcatcgcaggcggcgacgcctacaaggtcaccatcgagggcgagacctacgacgccgaggtcgtgggcagcgatcccagctccgacatcgcggtcatcaaggccaaggacgccagcggcctcaaggccatcgagatcggcaactccgacgaccttatcatcggcgagtgggtcatgaccatcggcagcccgttcggcctcgagcagtccgtcgccaccggcatcgtgtcggccacgagccgctcgcagatcatggacgccggcaccgaccagtacggccagagctccggcgagaccaccatctacccgaacatgatccagaccgacgcggccatcaaccccggcaactccggcggcgcgctcgtcgatgccgacggcaagctcatcggcatcaacacgctgatcacgtcctactcgggcaactactccggcgtcggcttcgccatcccggtgaactacgcggtgaacctggcgcagcagatcatcgacggcaagaccccgacccacgcgcagctcggcgtgtcgctgtccacggttaacgcccagaacgcccagcgctacggcctgtcggtcgacgagggcgcctacgtggccgccgtcagcgcgggctccggcgcttccgaggccggcctgcaggagggcgacatcatcacgaagttcgacggccagaaggtggagtccgcgagcgacctcatgctggacgtccgctccaagaaccccggcgacaaggtgaagctggaggtcaaccgcaacggcgagacgaaggaggtcgaggtcacgctcggctccgacgagagctcgcagagcgcctccacccagcagaacaacgctcaggaatccctgctcgagcgcctgttcggcggtggcagcgggtccagcgagaacgcggcgtaagggttgcgggcggatacccgccgcccgtctgctcattgcgtgaactgcctggaaaaggccgtgcgagctgcgcggccttttccattttcgggtaagattgatgcaacgtatgcacatatgacggtcatcgaaggggttggtcatggctgaggacagggcgaaggcggaggagaacgtcgaggagcttgagaagtgggcgcgcgtgcgcgagcgcgggtatgcgtacccgcgcgtgctgctgaagctctcgggcgaggcgctggcgggcgacgtgggatacggcatcgacccgaaggtcgtcgacgcgctggccgacgagatcgccgacatcgtcgaggacgaggtggaggtggccgtggtcgtgggcggcggcaacatcttccgcggcttggcgggaagcgccgagggcatggaccgcgcccaggccgactacatcggcatgctggccaccgtcatgaacgcattggccctgcaggacgccttcgagcgccacgggatcttctcccgggtgcagagcgccatcaccatgcaggaggtttccgagccctacatccgccgccgcgccgtgcgccacctggagaagggccgcgtggtcatcctggccgccggcacgggcaacccctacttcaccaccgacaccacggccgccctgcgcgcctgcgagctcaacgtggactgcctcatgaaggccacgaaggtggacggcgtctacgacagcgacccgtccaaaaacccggacgccaagcgcttcgaccgcatcagctacatggacgtgctgtcgaagggcctcaacgtcatggactccacggccacctcgctgtgcatggacaaccacatgcccatgatcgtgttcgatctgacggtcgagggcaacatttcgcgcgctttgaagggcgaaaacgtcggaaccacggtagaatagaggcacgtccgcgctccggcgcgggcgatcggtgcgcgccgccgcaccgcagggagttgggtgaaaggagccgatcatggttgatgatattatgttgcaggccgaggagcgcatggagcgtgcgctcgcgtcgctgggcgaggcgttcggctccgtgcgcacggggcgggcgaacgccctgctgctcgaccgcatcaaggtggactactacggcgtgcccacgccggtgaaccagatggccggcatcaagacgcccgacgcgcatatgctggtcatcgagccgtgggacaaaggcgtgctgggcgccatcgagcatgccatcatggagagcgacctgggcgtcacgccgtcgaacgacggctcgtgcatccgcctgccgttcccctcgctcaccgaggaacgccgccgcgagctggtgaagcagtgcaagggctatgccgaggaggcccgcgtcgcggtgcgcaaggcgcgccaggacgccaacgccgccctcgatcgctgcgtgaaagacgacaacctccccgaggacgacgagcgccgcgcccaggccgaggtgcagaagctcaccgacaagtacgtggcccaggtggacgaggccttcaagaagaaggaagccgaagtgatggaaatctaggggttccgcgggcctccggaccgcggaactgctcgacgctgcgaagcgtcgatgcgcccgatctcgcggcgaagccgatgactcgcgtaccgaagtacgcttcgccatcgccttccccacgatctcgaacacctcgacgcttctcgctgacttactacgccaacctgtgggatttgaatcaacctgcgcggttggcgtgcgacttgaaagcagtgcttccttgaacaaaccgctcgactacatattcccgaaccctcccgccgacctcgatccgacgcggctcgaccctgcggcggtgcccgagcacgtggccgtcatcatggatggcaacggccgctgggccaaggagcgcggcaagaaccgcctgttcggccacaaggccggcatcgaggcggtgcgcgagaccatccgctgcgcgtcggacgtgggcgtgcgctacctcaccatctactcgttctcgtccgagaactggaagcggccgcaggacgaggtcatcggcctcatgaacctgttcgccaccacgatgcttgccgaggtggacggcctgcacgaggagcacgtgcgcgtgatgaccatcgggcgcaccgacgagctgccgaagaagacgcgcgacgcgttcgcgaaggcgtgggagaagacgaaggacaacgacggcatgacgctcgtggtggccgtgaactacggcggccgcgtggagatgctggacgccatgcgatcgctcatggacgaggcccatgccgcggcgcgcgccggccgcgcgcccgaggagctcaccgaggagtcgttcgcccggcacttgtacacggcggacatccccgaccccgacctgctcatccgcacgagcggcgagatgcgcgtgtcgaacttcctgctgtggcagatcgcctattccgagttcgtgtgcaccgacgtgctgtggcccgacttcgaccgctacgagctcctgcgggcgttcttggagttccaggggcgcgaccgccggttcggggcggtgaagtaggatggagccgcggcgggccgacgaggcggttccggaagaggacgaccgcacgcgcaaggagcggctcaagaacttcgcgcaggacaagaccccaaagaagctgaagaaccccacgaacttccaggtgcgcttccgcactgggttcgtctacatcgtcgtgtccgtggtgtgcgtgctggccagcgagtggaccacgctcgcgctgctcgtggccatggccggcatcacggccggcgagttctactacatgctgcgccaggacgcgaagctgccgaacgagatgctgggcatcatcgccgccatgctgtatcccgtgagcgtgttcttcctcgggctgaacggggcgctgtacgtgagcctggcgctgctcttggcgctcatcgtgtggtacgtgttctggatgcgggcgcgcgtgcccgacgtgggcgtgagcttcttcggcgccgcgtactgcggcatgctgctgtcgggcatcatcgtggtgcgcgaggcgctgccggcgccctggggcggcgtgctggtgctgggcatcctcttgagcgtatgggccaacgactcgttcgcctacctggtgggaagcaagttcggcaagcataagctggctccgcgcacgtcgccgaagaagagctgggagggcttcttcgccgggcttgcgggctcggcggtgttctggtgcctgatgacgctcgtgcccggcgtgaccatgtccatcccgcaggccatcctgttcggcctggcgagcggcctcatgggcgtgcttggcgacctggccgagagccgtatcaagcgcaactccggcttcaaggactccggcaccatcatgccggggcacggcggcctgctcgaccgttgcgactcgctgttcctggtggccgtgacctccgccatcctgctggtggccgggggctgcataccttattaggcatcgcgcctgcgtgaacgcgcggagcgcaaggaggcacgtatgaaacgcatcgtcgtactggggtcgaccggctccatcggcacgcagacgctcgacgtggcacgccgccatgccgacaagctggaggtggtggcgctcgccgcggggacgcgtgcggaggagctgctggcccaggcgcgggagttcggcgtgcaccacctgggcgtgggcgacgggcgcctggcgggcgagccggtggccgacgagctggccgcgcaggcgcgcggcggcgcacggccggcggatgcgccgtcgtcgctggccgaggccgtggcgcgccgcagcgcggccggcgagggctcgctcgggttcggcgcgcaggccgtggccgacctcgtgcggctgccggaggccgacatcgtggtgaacgcgctcgtgggcgcggccgggctgcgtgccagctacgagacgctgcgcgcgggcaaggtgctcgcgctggccaacaaggagtcgctcgtggtgggcggcgacctcatcatgccgctggccgcgcaggtggacgcgcagcgccgcgcggccggcacggcgcctgccgccgggcccgccggggcgctcatgcccatcgactcggagcacggcgccatctaccagtgcctcctgggcgaggatgcgcgcgaggtcgcccgcctgtgggtgacggcatcgggcggcccgttccgcggccgcacgcgcggcgagcttgcgcacatcacgcccgcccaagcgctcgcgcaccccacgtggaacatgggcgcgaagatatccatcgactcgtccacgctcatgaacaaggggctcgaggtcatcgaggcgcaccacctgttcgccatgccctacgaccgcatcagcgtggtggtgcagccgcagagcgccatccattccatggtggagtactccgacggcagcgtgaaggcgcacctcggcaccaccgacatgcgcatccccatccagttcgcgctgtcgtatcccgagcgctgggacgcgccggtcgcgccgctcgacttcacgaagctgggctcgctcgagttcgctgcgcccgacaccgacacgttccgctgcctggcgctggcccgcgcggccggcgagcgcggcggcacgctgccctgcgccatgaacgccgcgaacgaggtggccgtggcggcgttcctcgccgaggagggcacgtacctggggatagccgcctgcgtggaggccgttatggacgcccacgacgtgcagcccgtggagagcctggagcagctggaggccgtggacgcctgggcccgcacgaaggcccgggagtggatcgcgggacggtaaggggcagccccgctctttgcggtggcgaaggggaaggttttggcatggaagtcggagaaatgcgcgcgggcaggcgagatcctttctgcctggtgatctgcgcagccgctgccgtcgccgtcgcgctcggccttctggcagcagcggggggcgtcccggcgcccgaggcgtcgggcgagccgctcgtgcaggtggtgaggagtgcgaagcagttccccaaccgggtggaagcgggccgcgtatccttggggtatcctgacggtatgtgggtgatcttggagcccgagccggacgagacgaacgtactggggaagctgctcacggtgacgcaggccttggtgggcgacgacgatttctcccacgggttcgcggtagtcgagtgcgagggcctgagcttcgaggacgtgcgggagctcgccgaaaccgcgcagcagcaagcgcccgcgcgtgccgagatgctggaagggaaggccgccgagtcggaatcttctgcgcagatgtacggagggctggcgagccactaccgcaacgtcgtgtacgataccccggagcctgtcgtgatgaacggccgtcgtggtatcgtctgggggatggttgtgccctttgagggtggcagagccgtcacgagaatcaacttcatcgaggttgatgggagtacggtcgggatcgtgtattgcggcttctaccagcacgaatacgatgctgatcccgcattctgggacgacatcctcgccagcctcgaggtgcgctagagaaaaacgccggcccccgtgcggctcgccgccgttcggccgcccttgcccgacctgccgtccggcctgctgcagcccggtctgtcgctgcccaacccgccgccgttcggcctgccgtcgtcggcttcccgtgtgcattttccacagggcttgtaggtttttcccgcacatcggttcgggcgggctcccgtttcctataatgggcgcaggcgcgggaaaccgcgctggttttcccaacctcgcgctcgaaaggattcgagttcatggatatagttctgatgataatatacgccacgatcctgctcgggttcctcgtgttcatccacgagggcgggcactatctggcggcgcgcgcgttcggcgtgcgggtgacggagttcatgttgggcctgccggggccgagcatcggcttcacgcggggcggcacgcgattcggcgtgacggccgtgccgctcggcgggtacgcgaaggtgtgcggcatggaggcgggcgagatgagcccgcacctcgaggccgtgctcgccgcgctctaccgccgcggcaccgccaacatggaggacatcgcgcgcgactgcggcatctccgacgacgaggcgtacgacgcgctcgaggagctggtggagtggggcagcatcaagggccccacgaagaaagaccagtacaacacgtaccgcgccgtcgagacggcgcccacgaagaagcagctcaaggccgcggcggcgggggagccggcgccggcgtcctacgcgctcgggcaggcgcgcccggtggacgacgcgcatgcgcggtatcagggcgagtaccgccagcagtaccgtgcgctgccgttctggaagcgctccgtcatccttgtggccggcgtgttcgtgaacctgctgttcgccatgctgctgttcgtgctcatgtactcggtgatcggcttcgaggcccagagccccaacaccggcgtgttctaccacgccgcgctcacgccgctgcagtccttgcaggccggcttcgcctacatcggccaggtcatcgccctggtggccagcctgctcaatcccgcgaccgccgcggacaccgtgtcgaacaccacctccatcatcggcatcgccgtcatgtcgaaggacgcggtggacatggggctcatgggcatcttgagcttcacggccatgatctcggtgtcgctcggcatcatgaacctgctgcccatcccgccactcgatggcgggcgcttcgtggtggaggtgttccagaaggtgtcgcggcgcgtggtgtccacgcgggcgctcaactacctctccgcggcgggcatgctgctgttcctgggattcttcctgatcatggcgaaccaggacatccagcggttcgtgttcgggaactggtgagtggcggcctcggggccgccggaacccgctgatcgcccggccgcttttggcatctggccttcgggtcccggcttgccccgtcgcgccggaggcgccctccgtgcatccttgggatggggccgcaaaggcacagtaatcaccggttttcgacgggctgttcctctcccgggattacgccgctttcatcatcacctcgcgagcagggaaaacgtccgaagtcccggacgaagcgcgttcgcgcaggcagtccctgcctcgaatcggtagaaaatcggtgattactgtgcaacggagcctcggcttcggttctcgcttcgcacggtccgtgcaaggcccgggccggtacggtgcacctcgaacctgctttgggcacctgtcggttgcttgccggccgcttccggccggtttttgcggcagacttcgtgaagggacctcgggcgggccgctttcggcggtacaatagcccgacatgcggtttgaggcgcttgaggaaacggaggggcggatgcccggcacagcgaagccgaacgaggggacccggcgggtcatggtgggcggcgtgccgctcggcggcggcgcgcccgtcgtcgtgcagtccatgctgaacgccccggccggcgacgtggcggcgaacctcgcgcagatcgaggcgctggcggcggccggctgcgaggtcgtgcgcatggccatcccgcacaagaccgacctcgacgcgttcgaggccgtgtgcgccgcctcgccgctgcccgtggtggccgacatccacttctcggccgatatcgcggttgaggccgcgcgccgcggcgcggcgaagctgcgcatcaaccccggcaacatcgggggcctcgccaagtcggacgccgtgctcgacgcggcgggggaggccggcatccctatccgcatcggggtcaacgccggctcgctcgacgccgagctggccgcgcgtactgacctcacgctcgcgcagaagctcgcgcgctcggccgccgactacgtgcgctactgcgagggccgcggcttccgcgatttggtggtcagcgcgaaggcccacgacgtcatggccacggtggccacgtaccgccagctcgcccgcgagctgccaacgtgcccgctgcacatcggcgtgacggaggccggcaccctgttccagggcgtcatcaaaagcgcctgtggcctgggtatcttgctggaagagggcatcggcgacacgctgcgcatctcgctcaccgacgaccccgtgcaggaggtccgtgcctgctggacgctgctcgcggcgctcgatttgcgccgccgcgcgccggagctcgtgagctgccccacgtgcgggcgctgccaggtggacctcatcgggctggcgcagcaggtggaggagcgcatcgcgaacctgggcaagccgctcaaggtggccgtcatgggctgcgtggtgaacggcccgggcgaggctgccgacgccgacatcggcgtggcgtgcggagcagggatgggcgtggtgttttccaagggagacgtcgtccgcaaggtggaggagaaggccatcgtggacgctttgatggaggagataggaaagctatgacgaacgcgaatatcatgcgcatgagcgagctgtacgtgcccacgctcaaagaggatccgaccgatgcggagatcgccagccacaagctgcttctgcgcgccggcatgatccgcaagacggcctcgggcgtgtacacgttcctgccgctcggcaagcgggtgctggcgaaggtggagcgcatcgtgcgcgaggagatggacgccatcggctcccaggagatcatgatgccggcgctgcagcccggcgagctctggcacgagagcggccgttggaacgactacggccccgagctcatgcgcctggtggaccgccacgaccgcgagttctgcctcgggcccacccacgaggagcttatcacggccctcgtgcgcaacgagctgcgctcctacaaggagctgccgctcacgctgtaccagatccaggtgaagttccgcgacgagatccgcccgcgcttcggccttctgcgcagccgcgagttcatcatgaaggacgcttacagcttccacgcgagccaggagtcgctgcagaagacctacgacgacatgagcgccgcctacgggcgcatctgcgagcgcatggacatggactaccgtcccgtggaggcggattccggccagatcggcggcagcgtgacctgcgagttcatggcgctcgccgaggcaggcgaggccgagctcgtgcactgcgcgtgcggctgggcggccaacgccgaggcgggcgactgcctggcgcgcccgaccgtctacgacgtgccggccatggagaaggtggccaccccgggcgtgcacaccatcgccgagctggcggcgttcctggacatccccgagtcctcaaccgtgaaggcgctgtcgggcaagaacgacgcgggcgacctggtggtgctgttcattcccggcgaccacgagctgaacgagctgaaggccgagcgcgtggccggcggcttcacgctgctcaccgacgaggacatggaggccttcggcctgcacaagggctccatgggcccggtcggcctgcccgaggccgcgcgcgtcatcgcggcgcgcagcctgcaggccgtgccgaagtgggtcgtgggcgcgaacgaggacggctaccactacgtgggagcccagctgggcgtggacttcaaggtggacgagtgggccgacctctgcatcgtgcagcccggcgacagctgcccgaagtgcggccttccgctcgagggagcgcgcggcatcgaggtgtcgcaggtgttccagctgggcgacaagtactcgaaggccatgggcgccacgttcatggcggaggacggctccgagcagccgttcctcatgggctgctacggcgtgggcgtgtcgcgcaccatggcggccatcgtggagcagcacaacgacgagaacggcatcgcatggcccttctcggtggcgccggcgcacgtgtgcgtgctgccgctcaccgtgggcgacgacgaggtgcagccggcagccgagaagctggccggcgatttggcgaagctcggcctggaagtggtcatcgacgaccgcaaggagcgtgccggcgtgaagttcgccgacgccgacctcgtgggctggccgctgcaggtcgtggtgggcaagcgcggcctcgccgagggcaaggtggagatcaagcaccgcaagacgggcgcgcgccgcgacatctcgctcatggcgctcaccgacgcggtggcgttcgcgcagcgcaacacgaaggtgtggggctccgaggtcgacctgttcggcggattgttcgcctgatgagctccttcccggacgtacgcggggtgctgttcgacctggacggcaccctgctcgatacccaacgcctgattttggtttcgttccgccatgccgtggagacggtgctggggaagagcatgcccgacgagctgctcatggccaaggtgggccagccgctcacagtgcagatgtgggacttcacggacgaccaggaggtgcacgacgagctgctcgccgtctaccgcgactacaacgcccgcgtgcacgacgacctcatccgcatcttccccggcgtgcccgagctgatcgccgatttgcgcggcaggggcctgctcctcggcgtggtaacctccaagcgccacgaggctgccctgcgcggtctggccacgttcggcctggatggtgcgttcgacctgctcataggctccgatgactgcgccacccacaagcctgatcccggtccggtcctccaaggctgcggcttgctcggcctgcgccccgaggaatgcctctacgtgggcgacagccccttcgacctccaggccggccacggtgccggctgccccacggccgcggccctctggggtatgttccccgaagaggtgctgctggccgaagagccggaggtcgtgtgccgcgacgtaggggagcttcgcaggtgcctgctctagggtgccacgtccgctccagctagcctggcacctgaaacgccatccgcccgggcgcgggcgggctgggctgcggggctagatcctctcgtgcccgcccaaggaatggagggctcctccgggggccagaagggcgtcgagggggcgctcgaaggcgcgcgcgaacttcacgaccttcgagaagtcggcgtctatcaaaccgtcctcgatgtcggtgatgtggcttcggctggacccgaccatgtccgccagctcctttttcgtcagatgctcgctctcgcgcaggacgcgcacgttctcgccgaacgtgcgcgcaagatgctggacaaggggatccttgcccagcatcttggcctgtcgtgatttctccggcatagtcgaaatcgtaggcgagctctcgaaggtaaaagtattcagatgaatacacttcgctgcaccaaaccacaaaaccgcccatagcgggcagaccgcgggcagtccgccctccgcctgcgcggcattcggccgatcgcgcccctcatccccctattctgttgcttagcagtgaatttcccccggcatctacgccgcgacctcaaccttcctctataatcggttattcgatctttgactaactgcaaatcgaagggggtgtgagttcatgccgagacttcaaatcatggataccacgatccgcgacggccagcagagcctctgggccacgcgcatgcagatcggggacatgctgccgatcctgccgaagatggaccgggtcgggtactgggccatcgaggcgtggggcggtgcgacgttcgacacgtgcctgcgctttctcgacgagaacccgtgggagcgtctgcgatctatcaaggcgaacacgccgaacacgccgctcgccatgctgtcccgcggccagaacctcgtggggtacaagcactactcgcgcgagatctgcaaccgtttcatcaaggcttccaagcgcaacggcatccacgtgttccgcgtgttcgacgccctcaacgacatccgcaacgtcgtggacaacgccgaggccatcaaggaatgcggcggccacttcgagggcgccatctcctacaccatgtcgccggtccacacgctggacagctacttggagtacggccagaagatgaaggatctgggcgccgactccattgccatcaaggacatggccggcatgctcacgccctaccgcaccgagcgcatggtgaaggcgttcaacgccgagatcggcctgccgctgcacatccactgccactacgtgggcggcatggcgcccgccaacatcatcaaggctgccgaggccggtgccgccatcgcggacacggcccacgcgccgctcgcgttcggcaactcgcatcccgccgtggagatgatcgtggccgccctccaggagagccgctacgacacggggctcgacctcgacctgctgttcgagatcgccgagtactgggaggaggtgcgcaagcgcggccactacaagcgcggcgtgtcctcgctcacgcacatgaaggtgtactcgcaccaggtgcccggcggcatgatgtccaacctcgtgtcgcagctggagatccagaacgccggcgaccgtctgcccgaggtcatgcaggagatcccgaaggtgcgcgcggaggtgggctacccgccgctcgtcacgcccctgtcgcagatcgtgggcacgcaggccgtgttcaacgtgctcaccggcaagcgctggagcgtggtgtccaaggagatgaaggactatatctgcggctactacggcaaggcgccgggtcgcatggacaaggacatcgtggcgaaggtggtgggcaactccgagatgctgccgcccgatattgcccccggctcgctcgtgaccactacgtattcccaggtggaagacgagatcggcgacctcgcgaagagcgaggaggacgtgctcatgtacgccctgttcccgaacgaggcccgcacgtacctgagcaagcaccgcacatcggagaaggtcgacttcctcatggagcaggagtcgagccacaccaaggaggacgattacgtggacatcaatcagattcgcgagctggttcgcgtcgccgaggaaagcggcgtcggcgagatcgtagtcgaggaggagggcacccgcatcgccgtgcgcatgccgggcacgctgtcctccgacgccgtggcggccgcagccgcggcggccccggtggccgccgtcgcccccgcccccgcggccgaggcccccgcttccgccgacgacggcgtcgagcgcccctcgaactggtactgcgtgacggcccccatggtgggcacgttctacacgtcccccgcgcccggcgagccgccgttcgtgcaggtgggtgatgaggtggctgccaaccagacgctctgcatcgtggaggccatgaagctcatgaacgagatcacggccgaggagatgggcacggtgcgcgaggtgtgcctcgaggacgccatgcccgtcgagttcggcacgccgctgttctacgtcgagccccacggcgccccggccccggctccggagacggcgtaatgtttagcaagatactggtagcgaaccgcggcgaggtggcgttgcgcatcatgcgcgcagccaaggagctgggcgtgaagacggtggcggtgtactccacggaggacgcggacacctatcccgtgcagtacgccgacgaggccgtgtgcatcggccccgcccaggcgaacaagagctacctcgtcatgcccagcatcatagccgcagccaagaacgccggcgccgaggccatccaccccggctacggcttcctggccgagaacgccgacttcgcccgcgcctgcgtggacaacgacctggtgttcatcggccccgcggccgactgcatcgagcgcatgggcgacaagagcatggcgcgcgagaccatgaagtcctgcggcgtgcccacggtgcccggctccgacggctgcatcgacacggccgccgaggccaaggcgttcgcggacagcgtgggctatcccgtgctcatcaaggccacggcgggcggcggcggcaagggcatgcgcgaggtgcacgacccagccgatcttgaggcccagtaccaggccgcgcgcaccgaggccggcgccgccttcggcaacgacggcgtgtacctggaaaagctcgtgctgcgcccgcgccacgtggaggtgcaggtgctggccgacgacttcggcaacaacctggcgctctgcgagcgcgactgctccgtgcagcgccgccaccagaagctcatcgaggaggcgccctcgccggcgctcaccgaggacctgcgccgcgccatgggcgtggcggccatcaaggccgtgcgcgccgtgaactacaagaacgccggcacgatagagtttctgctcgacgagcgcggcaacttctacttcatggagatgaacacgcgcgtgcaggtggagcaccccgtgaccgagcagatcaccggcaccgacatcatcaaggagcagctgcgcatcgcctccggcgagcccatcagctgcgcctcccgtgcgccgttcgccccgttcggccatgcgatggaattccgcatcaacgcggaggaccccgcgcacggcttccgaccctgcccgggcaccatcaccaagttcgagcccccggcgggtcccggcgtgcgcgtggagagctatgtgcgcaccggctcgcgcatctcgccctactacgactcgctcgtggcgaagctcgtggtgtacggccaggaccgcgaggaggcgctgcagcgcggccgccgcgcccttgacgagttcgtcatcgagggcatcgagaccaccatctcgttccaccgccgcgtgctggacaacgccgtgttctgcgcgggcgaagcgacgaccgacttcattgagacccagatgggagacgtgttatgaacgagctgaaccttgacggcatggcgcttgcgccgggtgtcgtcgagacgatcgtgtccattgcagccaacgaggtggagggcgtggcctccgtgggctccgccgccgcgggcggactgcgctccgtgttcggcgccaagccgtccacccagggcatcgatatcgccgtggacgaggacgacaagctggtcatatcggtgcgcgtggacgtgtactacggttatgtgctgcccgaattggccgccaacctgcgccaggccgtggccgatgccgtggcgagccaggtgggggcgcaggtctcctcggtcgacgtgtacatcgacggcatccagtttgccggttagccggaggtttgctgagctcctatggctgctaaacgacatgaacgaacgcgtgcgcgccgctcggcgctcgcgctgctctacacgagcgagatcacggacgagggcgctaccaagatcgccgaggaaggccgctacctggccgaggacggcccgctgcccgactacgccacagcgctcgtgcgcggcgtggaggcgcaccgcatggccatcgacaagcatttggcggccacgtcggagaactgggcgcttgcgcgcatgcccatcgtcgaccgctccatcctgcgcctggccacctacgagatgatgtacgtggacgacgtgcccacctcggtcacgatcaacgaggccgttgagctggcgaaggacttcggcggagaggacgagtcgccgcgtttcgtcaacggcgtgctgggccgcatcgcgaagatcctggacgaggagaaggccgaggagaaggcggcgtcggcgtccgctgcggcgcgggagggcgagctgcccgaaggagccccttcccatggcgcatgagtcatatgaaagctttgaccaggtgaaggcccgcctcgacgagatcgtcgacgccgttggctcgagcgagatgcccctcgacgaggcgctctccctgtatgaggaggctgtgggattgggcctgcgggcgagcgagctgctcgaagagaacatcgaggcccgcgatgccgaagacgaggccgaagacggcgcgggcaaggccgtctgcgaggccgccgcgggaaccgaggttgaaatcgaagccgcagcttcggacgcggaggcgtccgcggcggctgcggctcaagcgtaacggggggcgtgactatggaccatcgcattctcgacgtgatctcgtcgccggccgacctcaagctgctgaccaacgaagagctctccatcctcgcccgcgagatacgcgaggagatcgtgtccgtaacgtcggagacgggcggtcacgtgggctcgtcgctcggtgccgtggagatcatcctggccgtgcacagcatgctggactgcccgcgcgaccggttcatcttcgacgtgggccaccaggcctatgcgcacaagctggtcacgggccgcctcgaggagttcaagtcgctgcgcacctacggcggcctctccggcttcccgaagcccggcgagagcccctacgacgtgcatccctcgggccatgcctccgactcgctttcggtggcgctcggcctggcgaaggcacgcgacctctcgggcggcgacaacaaggtggtagccctgataggcgatgcggcgctctcgggcggcatggcgttcgaggcgctcaaccacatcggacaggcgcagaccccgatggtggtcgtcctcaacgacaacgagatgtccatctcgcgcaacgtgggcgcgctcatgaagcacctcggctacatgcgcgcctcctcgcagtaccgccagacgcgcgactccgtccaggagagactggaaagcagcggacccttcggggaggcactcgcgaacttcgggcgcaacatgaaggaatccatgaagcagttcgtgctcccgcgtaccatgatcttcgagcagctgggtatcctgtgcacggcgcccatcgacggccacgacatcggcgcgctcaaggagacgctcgccatggtgctggagacggacgcacccgtgctcatgcacgtggtgacgaagaagggagccggctacgggccggccgtgcgcaaccccgagaagttccacggcatcgcgccgtacgacgtggctaccggtgccgtgaagaagaagccgtccgccgctccctcgtacacgagcgtgttcggcgcggcgcttgcggccgaggcgcgcaaggacgagcgtatcgtggccatcacggccgccatgaaggacggcacgggcctggcgggcttcgccgaggagttcccgagccgcttcgtggactcgggcatagccgaggagcacgctgtgggcctggcctcgggcctggccatcggcggcaagaagccggtcgtggccatctactcgacgttcctgcagcgcgccgtggaccagctggtcatcaacaacgcgctgccgaacctggacgtggtgttcgccatcgaccgcgccggcgtggtgggggaggacggccccacgcatcacggcatgttcgacctcgcatacacgcgcatggtgccgcatatgcgcgtgctcgccccgtcgaacgaggcggagctcgtgcatgcgctgcacacggcgctggcgctgggcggcccgttcgctatccgctacccgcgcggggcggcggagggcgtgccgctgcccgaggagccccaggtgctggaagtggggaaggcgcaggtggtgcgcgagggggccgacgtggccatcctcgcgttcggccgcatggtgggccgtgcgctgggcgccgcggagctgctggcggtgcgcggcatcgacgcgcgcgtcgtggacatgcgctgggcgaagccgctcgacgccgatgccatcgcgcgtgcggcgcagacgcgcctcgtggtcacggtggagggcggcatcgtgtcgggcggtgcgggcgagggcgtgctgggcgagcttgcgcgccagggcctggccgtgcccgcgctcacgctgggcatccccgacatgttcgtgccgcagggcaaggccgacttgctgcttcgcgacctgggcctcgatcccgaggggatagcggcctccatcgaggagcgcatgaaataggggcgactttacctaaacttgatctttccgttgccttgacttgacaaagcaccgttatcatacgattccgtgtgctttgtcaccgaagccgtgaaaggggccacaagttgaatactcttgccgatcggcgcccttcgttcgaggaggagtctgagtgagctacgatttcggctcgttcgctgcagcgttcgtcagcgaccccatactcgccctcatcgtcatcctgacgctgggcgccacggtggtgaacggggcgaccgacgcccccaacgccatcgccaccgtcgtgggcacgaaggccatgaagcccacgcccgccatcgttatggcggcgatatgcaacttcgtcggccttgccggcatcaccctggtctcgtcggccgtggccgccaccatcttcaacatggtggatttcggcggcgacaaccacgccgccctcgtcgcgctggcggcggccatggtggccatcatcgtatggggcgtggcggcctggtacttcggcatacccacgtcccagagccactcgctcatcgccggcatcaccggcgcggccatcgccctgcagggaggcctggggggcgtgaacggcggcgaatggatgaaggtggtatacggcctggtcatctccacggtgctcgggttcggcacggggtggctgttcacgcgcctcataaagaaggcgtgccggcgcgccgagcgctccaaggcgaactcgttcttcaagtgggcgcagatcgtgtcgggcgccggcgtggccgtgctgcacggcgcgcaggacggccagaagttcctgtcgctgtgcatgctgggcatcatgctggccatgagcggccagtcgggcggcgtgtcgttcccgttctggctcatcatcatggtgtcggccgtcatggcgctgggcaccgccgtgggcggcaagaagatcatcaagtccgtgggcatgaacatggtgaagatggagcagtaccagggcttcgccgcctgcctgtccgcctgcttctgcatcggcctggccacgttcacgggcctgccggtgtccaccacgcataccaagaccaccgccatcatgggcgtgggcgccgagaagagcctgcgcaacgtgaaatggggccttgccggccgcatggtgggcacctgggtgctcacgtttcccggctgcggcctactggcgtttgcgttcacgcacctgttcctgatgttcttctagggggatcgggtggtgcgtccaacgaggtcgtagacgggttggcgttgtagatcggcgcgaggggcccccgtgcccagaattgccgtgagccggcgaagcgcgcttttgcacgcgaggaaggcttggagcggcaaggctgggcacgggggcccctcgcgccgtcgagcgtttccgctggccgttaggccagcggaacgagctaatcctcttccacgacttctgcgccgggggcgttcctcttcacgctctcgatgcccttcttgcaggattccttggactggtagtgctgcgacgtggcgatgacttcgccgttgtcggctttcagcacgaaatggcatcccgtctcggacgtcttgatgacgaacttgcccatgcgaccgctccttctcttcgacgataacggaatcatataccccggtcagatagaaggggcgtcacagcaggcggtttcaccaatggttgaacggcatcctatgcgccgatgcgcttctccatgatgaagtcgtccatgatgaagccctgcccgatgtcggtctccacggagtcgatggtctcgaaccccttgccccggtacgcgcgcacgcccaggtcgttgtgcttgttcaccgtcaggtacatggccgcgagtccgcgtgcgcggcacaggtcctcgtagaagcggatggtctggctggcgaacccgtgcccacgctcttcggcgcgcaggtagatcttcgagatgaagaagcggttcgtctcgggctcgacgcgccctcccgtgtagcccacggtgcggccatcctcggcggtgcgcaggaaccagtactcgtaagcgtgctcggccacgtcgcgctcgatagcttcgaggctctggaactgttccaccatgtagtcggtttgggcctcgccgatgagggcgggccagtactcgtgccagatctcgctggcgagcgtcgccagggcggcgcggtcctcgggcgtttcgacggggacgaactcgatggtcatgcggtggtcctttctctcgcgtgtcccttccactataccgcaacggtgcgcgctgccatcgttcccgcagtccgattccttcgggctcgcggcccggtgctgcgaggcgtgtttcctttcggtaacggcgatgcttcccgtctgttaaaaggcgtttttgagcgcgttaacagttgcaggtctcgcttgggacggtcgcggggcggtgggatcatcgaatgcgtaaacaggtagcgctcgtattcgagggaggtagaggcacatgttcgacacaggatcgacgggtttcatgctggtatgcgcgatgctcgtcttgctgatgacgccggggctggcgttcttctacggaggtttgagccgtcgcaagaacgtcgtgaacacgatgctcatgtcgtttgcggtgctcggcatcgtgggcgtcacctggacggtgtgcggatggtcgttcgcgtacggcggggacgggtcgcttccgttcttcggaggcttcgaccagctcggcctcgcggggctggtggccgacatcgtgggcgaagcccccgaagcgctgagccacgacgcgtaccccgcgatggccgacgtggtgttccagatggcgttttgcatgatcaccacggccatcgtcacgggtgcggtggccgggcgcgtgaagttcggcgcggtgtgcgcgttcacggcggtgtggaccgtcgtggtgtacccgccgctcgcccacatggtgtggggcggcgaggggagtctcgtgggaggcatgatcggcgcgctcgacttcgcgggcggcgatgtggtgcacatctcgtccggcctcacgggcctggttctctgcgttatcgcgggcaagcgaaaggggtacgccgtgatgagctaccgcccccacaacgtgccgttcgtggcgctgggcgcgacgctcctgtggttcggatggttcggcttcaatgcgggctccgagttcgcccccgacggcgttgccgcgctcgcgctcgtgaacaccgcggcggcgtctagtgcggcgctcgtttcatggctggccgtcgagcgcgtgcgggtcggcaagcccacgctcgtgggcgcggcgacgggcttggtgaccggactcgtggtcatcactccggcagcgggcttcgtggagccatgggcagcggcggcgatgggcgtcatcgtgtcgcccgtgtgctacgccgccgtctcgttcctcaaacgcacgttcggctacgacgacgcgctcgacgcattcggcatccatgcggtcggtggcgtgaccggcggtattctgaccgggctgttctgcgtgcccgagctgtcgtggaccgatttcggcggcctgctctataccggcgatcccacgctgctgggcgcgcaggtgctcggcattctcgtgacggcggcgttcgtgggcgtgctcgacgtggcgctcggtttcatcgtgaaggcgtgcttcaggggaagcctgcgtgtgggcgaggcggaggaggcgcagggcctcgacgtgaccgcgcacggcgagagcgcttatccggcctatgtgggactcgactaaggttccccttctgccgaacggcggaacgggccggcgattctcgctggctttgacgaatcagtgatagcaaaggagctgctaaatgaagaagatcaccgccatcgtgcggcccgagaagctcgagccgctcaaggaggcgctgttcgtcgcgcaggtgggcggcatgaccgtcagccaggtgcaaggctgcggcagccagcatggttggaaggagtactaccgcgggaccgaggtgatgctcaacatgataccgaaggtgaagttcgagctcgtggtcgacgatgcagaggtggcgcctctcgtcgacctcgtccgcgccacggcatgcaccggcgaggtgggcgacggcaagatcttcatcttcccggtggaagaggtggtgcgcatccgcaccggcgagacgggcgccgccgctgtgtagcgagtgcagaaggtgccggcatgtccggacggcaccgatccagcctggatcggtgccgtcccgtgtggaggttcggcggcggggtttgcaggttgttgttaatgggatataatcctatttaaattacgatagtgataagcagacccaaggagttcgcaatggccacggcaacgaagaagggggcgtccacggcgccctcgcgcaacaccatacagcgggcgctcgtgctggaggcggtgcggtcgctgcataaccaccccacgtcggccgacgtgtacgaggcggtgcgtcgcacgtacccgaacatctcgcgcgccacggtgtaccgcaacctgggcgtgctggctagccgaggcgacgtgctgcgcgtcgaggtgcccaacggcgccgaccgctatgacttcttcaacgaaccgcactatcacgcgaagtgccgcgtgtgcggcggcatcgtggacgtcgatatgccctacgagccggacatcgcctcccgtatagccgatgcacatggcttcgctatcgagggccacgagatcatcttcgacggcgtgtgcgccgcttgccagaaagcctagggccgaggcctgccgcgcggcgggcagaaacggccgcgccttcgcgcctcgcgccctccgccgcctgcctcatggggtagaatggacgcgggaacacgccccggaaggcacggggtgcaaaggcgcacgcggacaccgcccgtcgtccgagacgggcacgggccgagggagatagcgaggagagggccggcatggctaacccttacgagatattcgacgcgctggcggaatgcgtgtacgtgagcgatctcgatacccacgagatgctgtacctcaacggatccgcggagcgcctcgtaggcgactggcggggccggacgtgctatgacgtggtgctgggcaaagacgccccctgcgagttctgcaacaaccacgagctttccgcggacgcgttcgtcacgtgggcgcactacaacgagaagttcgggcgccactacctgctcaaggacaaggtcgtggactgggagggccgcccggcccgtttcgaggtggcgttcgacatgaccgccgagcaggagcagcgccgggcgttggagacgaagctgggcctggagacgctgctcgtgcgctgcgccatgaagctgcagaacatagacgggttcgcgggcgacatgacgtccgtgctccagatgataggcgagttcatggaggccgaccgcgtgtacctcttccaggtgtcgcccgacggcacctcgttcagcaactcgcacgagtggtgcgccgagggcgtggtgccccagatcgacgagctgcagaacatggacctgcatttcgtgacgcagtggatgccgctgttcctgaagcgcgagaccatcgtcgtcaagaacctggaggatttgcgcgagacttcgccgaacgagtacgagatgctcgccccgcagggcataaccaccctggtggacgcgccgctgctcgtggagggcgagctcatcggctccatcggcgtggacaatccggccgctatccacctggaccactgcggggagttcttcagcagcctttcctacttcctgtccatggagctggagcgctaccgcacgaaggagcggttccgccagctcagcttcacggacacgctcaccggcctggggaaccgcaaccgcttcatcgccgacgtggaggagctcgacgccgcgggcccgcgcaacgggttcggcgtggtgtacgtggacatgaacggcctgaaggacatcaacgaccgcgacggccacgcaaggggcgaccgcgcgctgatcgcggcgggcagcgcgctcgcagacgcgctcccgggggcatacgtgtaccgcatgggcggcgacgagttcctcgccatcgtgaaggacgtctccgcagacggcttcgacgcgctggtggaaacggtgcgcgcccggctggccgacgcctcgtgccccatggccatggggctgcactacgccgcggagccttgccttgtcgacgaggccgtcaggtgggccgacggtgccatgtacgaggacaagcgggcctactacagctcgcatgccgcctccgcgcgctaccgcggctgatgcgaggccaaaggtggcggaatggcgagaaataatcgtggggccttgtgaatagtggttctggggacgttgcctgtgtgatatactaatgcggcttatcgggaatcctcccggaagcgcacgtaactgtaggcccccgagacatgtttttgttgcacagctgagcgagcaagcttttgcagagcgaacatggtgtaagcaatcaatcatgacgaagggtccccgacttaagtttgaaaggggtccgttttgaccgacattaagaacacgtccgtcatcgacttcagcgacatctccgacgagcagatgaacgagatgatcgacggcacgctgaccgagttcgacgagggcgacctggtcgacggcacggtcgtcaagatcgagcacgacgaggtgctcgtggacatcggcttcaagagcgagggcgtcatcccctcccgcgagctgtccatccgcaaggacgccgacccgtccgacatcgtggagctgggcgagaagatcgaagccctcgtgctccagaaggaggacaaggacggccgcctgatcctttccaagaagcgtgccgagtacgagcgtgcatggatccgcgtcgaagagaagttcaaggccggcgaagtggtcacgggcgaggtcatcgaagtcgtcaagggcggcctgatcctcgacatcggcctgcgcggcttcctgccggcgtcgctggtcgacctccgtcgcgtcaaggacctcgacatgtacctcaacaccgagatcgaggcccgcgtcatcgagatggaccgcaaccgcaacaacgtcgtcctgtcccgccgcgtgctgctcgaggagggccgcaagaacgagcgcgccgagatcctcgcgaagctctcgaagggcatgcgcctcaagggcaccgtctcctcgatcgtcgacttcggcgcgttcgtcgacctcggcggcatcgacggcctggtgcacatctccgagctgtcctggaaccatgtcaaccatccgtccgaggtcgtcaaggtgggcgacgaggtcgaggtggaggtcctggacgtcgatctgcagcgcgagcgcatctcgctcggcctcaagcagacgacggaggatccgtggatcaagctcgtcgagagctatccggtgggcaccatcgtggacggcaaggtgacgaagatcgtgccgttcggcgcgttcatcgagctgggccagtccatcgagggcctcgtgcacatctccgagatgtcgcagcgccacatcgacacccccgcgcaggtcgtgaaggccggcgacgaggtgaaggtcaaggtcatggagatcaaccccgagcgtcgccgcatctccctgtccatgaaggccgccgccgaggagctcggcttcgagatcgaggtggacgagtccatccaggccgaggagaagccggccaagaagaaggccgagaagaaggaagaggccgccccggctgccgctcccgccgaggagccggctgcggagtagcttccccgccgattgtacgagggcccctcgaaagaggggccctctttgctttatacggagtcgttggcgcagccggcccgttcggcccttgagctaaatgcttagcgctcgatcgacccgaggaggtcgcgggatgccgcgtccagcgcagagcggtaagctccctcgatttcagcgagagccaggtcgatgggggtttgcacggcgggcgcggcagcatcttcggcatgctgcggcaggtagctggccacggcatcgtgcacgaggtcgatatagacgcgcgcgccctcctcggtcagatgggtgccgtcgccgtcgaagagctcgtcgcgtccggcgctcgcgccgaaccagtcgatgagatggacgttcccatagcgctcggcagcgcctgccagcacgtcgttcgtggaggatacccagtcttgcgggctgcgggtgttcacgagccagagctgcttgtcggttcccacgtcggcgacgatatcgtccagctgcccatcggtagccggcccgttcgtgcccagcgccagcacgacgatgccgcctacaaggccctggtcgcgatacgagtcgtacacttcccttcccacgtagatctggcggttcacggcggcgtcgatggcgccgtgggggaagcgctcttggaaatagggcacggagcgcaccgataccgagtcgcctatcatgagcacatcgagcttcggttgctcttcggcgacgggcgcggagccttcgggctcctgcggcgactcctccgccaacggttgccccgacggatctgcctgggcctggcccgaggggctcgtctggccctgctcggcctgcttcagcaggtcgccgccctccaaggccgaggtgggcggcacgagcgccagcccgcctgcggccacgatcacgagcgtgccggcgcccacggcaggcacggcgtgcgtgcgcagccagtccggcagcgacgcctcgcccgagcgtaccttcctcaccagacggccgaaggccccgtggcggaaggggttctccacgaagcggtacgacagcgcggcgcagccgaacacggccgccagctgcagcaggtagagccaccaaggcgtgtcgccgatgccgcccgggtccatgagcagcagcaacgggtagtgccacaggtagatgccgtagctgcgcttgcctatccacacgagcggcctcgcgcccgcaacgcgcccgatgatgctggccggatgcaccatgaccgcgatgaccaaggcggtgagcatcgagcacagcacgagcccgccccggtacaggaagggcgagaacccgttcgagaacaccaccagcagcagcaagcccgcgagcgccgcggcccccacgccgtcgagcacggagcgctcgcgcttcgtcaggcgcacgccgcttttggcgcccaataggtgcgacggccacacgaacgccagccatgcgccgatgagcagcgaaaacgcccgtgtgtcggtgccgtagtacacgcggctcgggtcggcggcggggtcgaacagcagcgccatctccagtgcggagagcgcggccagcacgagcacgacgttgcgcaccgtgcccttcctcgctcccagcttcagcgcggcgagcagagccacgggccacacgaggtagaactgctcctcgatggccagcgaccagaagtgcgcaagcggcgacggcgcgccgagcgcctcgaagtaggacacgtcgtggaatatctgccaccagttgttgaagaagagcagagacggcaggacgtcggggcgcatcttcgtgagcagggcgtggttgaacagggtgcagagcacggccgtgcaaacgacgacgagcacgatggcgggcacgagccgacggacgcggcgcagccagaagcgcggaaggtcgatcgtgcccgattcgtcgtgctcgatgagcagcaagctggttataaggtagcctgacagcacgaagaagacggtgacgcccagcaggccgccgggtgcccagggcatgcgcatatggtaggcgataacggcgagcacggcgaaagctcgcaggccgtcgagcgccggtatataacgggatttcgagcccgacacgtgcgatcccccttgttgcgtttgcggtcgatgcgcgggatgcgcaggatccagtatcaatctataaggaaataaaagcaaatcgaaaaacaggatatatgcgaacccaccaaaggaaaaagctatgacccgtcgatttttcagtataatcatctaggccccgttaacgatggggtcttttttttgctttcgttttcgattaattttttagttccgttcccaccattctgtactaaagtagctggccttgtcgcggggcgcctgtcctcgagcagtattctacggagcctgtcggcatcaatcttatcggcgatggacgggcgccgctggaaccggtggcatgattagttaggctctcgaagagcaatatatatacgccagtgtccggctccagcgacgaccagcggacgagccatgcatagcacgtccggttcattattataggcaacaatcgtgccaatttgccgaggagcgaaaaggtttcaggctttttcatccaggattagggtgtgcaaaattaacccccccatgctctataatgtggggagcgcaaaggacctgcttccggaaaagggctaggctgttgcgcgatgcgacggctcgtagaaggtgccgttagccaagagggcgtagatgaggtctacgcgccttcgcgccagggctcggagcgcctgcttgtgctgcaagccctcggcgcgtttcctgtcgtaataggccttgcagcgcgggtcgtaccgtttcgctttctgcgccgactcgatgaacgcattcttgagcttccggttgccgttcttccttttcttgttcttcttgacgctcgtgcccgactcttccttcacgggcgcgatgcccccgtaggaagccaggtggttcgcgtctgggaagcggttgatgtcgccgatctcggcggcgatcgtcgccccgtagacgcgcccgatgcctgggacgctctttaggatcgccgtctcgggcaccgcatcggcgcgctcctcgatggcggcgtccagctccgattcctcctggtcgagctcgaggatgcgcttggctagcttcttgatctgaatctcgatgacctcggttgccgggagttcaaccgtcatggtgccgagcgcctcgaacacctcctcaaccttcttaggcccacgggttttctgatacttgaggcttcccgcccacttggagacgcgggccttgccagcgcgtttgagccctcgggggccgccgtagcgctcgaatatttttatggccagatcggaatggaggctatcgccctcgaaaagctgctcgaggggcggggacacctgcagcaggaggtcgtgcagtcggttgtagtagcgcgtgcgctctttgacgatgtccacccgccgcgagttgaggactttgatttctgcgaccgcgtcgtcgcgcgtgccgacagttcggatcagcctcggggtgctgagggacacgtcggcgatgatgaaggcgtccttggcgtccgacttgccttccttgtaggtctcggcgatgttcttgaagtccttaggggtgatatgggcgacgtcgatccccatatccttggcgacggccaccacgagccgtccgatgttgccgaactggtcgacggttacgagcaccttgccatgcccgctcgcctcttccaacaactcgcggatactcgcctcatcttgatcgaagggccgggacagcaaccgttcgcccgtcgccccgtcgagcgccaccgcatggtgcttggtctttcctacgtctacaccgacgtacacgtcgtaatccatctccgcccgctccatagttccccttcctcgatgaatggaagctggccttgtcgcggggcgcctgtcctcgagcagtattctacggagcctgtcggcatcaatcttatcggcgatggacgggcgccgctggatccggtggcatgatactgggagctataggtagcattagcactgcgccggtgtccggttccagcgacgaccagctgcggaagccatgcatggcttccgcaagagaattataagcaaaactacctagtagaatagcgctccgtcaagcgccgagagcgtatcataccgcgctgcgctccttctgcgtaggctcttcacgtatagttgaagcgctgcgctgcacgggcatcgcttcctttatactggcgacgaaagaagatgcaaaaggagggaagatggcaacgggcgagaacggcgcacggcgcgttgcgctgggtatgagcggcggggtggatagcgcggtatccgccgcactgcttatgcgcgcaggctacgaagtggtaggcgtcacctgccgcttcaccgacgatgcggcggccgaccgcgccgccgacgacgcggcggcggtgtgcgcccggctgggcctgcgccatgtggagcgggactgcgcagccctgttcgagagcgcggtggtccagccgttcgtggatgcctacgcggcaggcctcacgccgagcccctgcgtgggctgcaacgcctgctgcaagctgccctccttgctggacgcggccgacgagctgggctgcgacgtcgtggccaccggccattacgcccgcatcgcacagcttgcggacaacggacgttacgtggtgaagtgcgcgctcgacgcccgcaaggaccagagctacatgctggcgctgctctcgcaggagcagctggcgcgccttgtgctgccgctgggcggcacgacgaaggcggaggtgcgcgtgctggccgccgacctagggcttcccgtggccgagaagccggagagccaggatgtgtgcttcatcgagggagactatcgtgcgtttctgcgcgagcggggcgtagacgatccgccgggcgccatcgtggactgcgcgggtgccgtgctcggccggcatgacgggctgtcaggtttcaccgtggggcagcgcaagggcatcggcgtggccgcgcgcgagccgtactacgtagtgggcaagcggtccgaaacgggcgagctggtggtggggttcgccgacgaggcccgcattgcgaacgtgctcgtgggcccggtgaggtggcaggccttcgtgtgcctggacgagccgcgtgccgccagcgtgaaactgcggtaccgtagccgggccgttccgtgtatcatagagcccgaacccgaagggcgcgttcgcgcagtgctgcgcgagccgcagccgaccacggcgccgggacagttcgccgtcttctccgtgggcgacaccgtgctcggaggcggcatgatcgaggaggtagcatcggtatgaagaagctgttcatcatcggcggcatgggcgccgggaagtcgactgcccgcaaggcccttgtggatgcgggcctgccgtacatcgacctcgacaaggtgggccacgacgtgctcgcctgggacacggtgagggaagagctggtggacacgttcggcgtcgacatcatggacggcgacgaggtgaaccgcaaggcgctcgcccacaaggcgttcgtgagtcccgccgagacgcgcaagctcaaccgcatcaccgtgccgcgcatcgaggacgcctaccgcgacaaggtggccgagctggaggccgcgggccatccggccgtggtggtggagcattccgtgttcaagaaccgcacgtcctcgctcgcctacgatgccgatgtcgttatcgccgtgctggcaccgctggacgtgcgcatcgagcgcgccgtggcgtcgggcttcgacgaggccgatgtgcgccgccgcatcgcccgccagatcaccgatgccgaccgcatcgaggccgccgacgtggtgttcaacaacgacggcacccccgaggaactgcacaaccaggtgatagcctggtggggagagtacgagaaaggcctgtaaagactagacggcgaggatgccccttgggcgggcccttcccgagcttttagtcgcgtccggcgtgggccagcatcatgttcgaaaaattatattagaacatccgttttataagtacggatgttcttttttgtgctaccatgtgatttgtcgaaaagagccagtgcaagcgcctgcccgatgccgcaatgcgggagggcggcccatagatggcgacggtgttccgcgtccgcccgtaccacgcttgcaagatcctctccagctttcggaaccggaagaggggtctgccatggaaaccttcatctgaaaaacgacgagaggaagtgcgggtcgctctccgtgccctgccttccttgacgctgcgccatttacgttttacaatttcgtttaacaaaaaggaataggtgatcgcccgatggaagtgctggttgatttgcacgcgctcaagcatgggttgaccgaggaagagatcctgtatgcttggaagaactacgcgaggaagcaacatcgtagggcaccgaaagaggatcgtgtggtagcccttgggttttgcagcgatggacgcctcgtccagatggtcggcgtcgacaaatggtacggtgtgctgatataccatgcaatgacgccgccgacagcgagcgttttggcagagttcgggctgacagggaggtagaacgtgaagacagcgaaagagcttgaggagatgttcggggtcaccgccgagcagcttgatgaatgggagaaggaagcagcgcagggcatcttgcctggcgagcaggtgggcgagatcattgtggggcgacccctcaaattcggggagccgttgcagttcgtcgggtttaaggacacgccgcagaaggttgcggctatggacgagcgggcgtcgaagctgggcatgagccggtcggattacctgcgcagcttggttcgcaaggatttggcaagcgcctaggcagctcgacatcatctcgaaagatggggaagataacggttgaatcacgaacatatgttcattttgcttctgctgtgctagactgagtggtcgatgaaccctctcgtcggtgtccttcggcatgcggcgttctcttcgggaaggagcttacgtggcgcatctttcgaatatcgagggcctcgagatggagggcaagctgccggaggtgcggctggctacgacgcccctcaaggtggtgtcgccctacgagccgtcgggcgaccagccgcaggccatcgagaagctggcccgcggggtcgaggacggcctgcgctaccagacgctcctgggcgtgacgggctcgggcaagacgttcaccatggccaagaccatcgaggccgtgcagaagcccacgctggtcatggcgccgaacaagacgctcgcggcccagctggccagtgagctgaaggagttcttcccgaacaactccgtggtgtacttcgtgtcgtattacgactactaccagcccgaggcctacgtgccctcgtccgacacgttcatcgagaaggacgcctccatcaacgaggaagtggagaagctgcgccatgcggccacttcggccctgctttcgcggcgcgactgcatcgtggtggcctcggtgtcgtgcatctacggcatcggctcgcccatggactatgccggcatggcggtgttcgtggacaagcagaaggagatggaccgcgacgacgtcatccacgagctcatcgacatccagtacgaccgcaacgactacgagctgaagcgcggcgcgttccgcgtgcgcggcgacaacctggacgtgttcccgccctatgcggacaacccgttgcgcatcgagttctggggcgacgagatagagcgcattgcggaagtggacaacgtcacgggcgaggtggtgaacgagttcgaggcgctgcccatctggcccgcgtcgcactacgtggccacgcgcccgaagatggaccgcgcgctcggcaccatccgcgacgagctgcgcgagcgcctgcagcagttcaaggaggagggcaagctgctcgaggcgcagcgtttggagatgcgcacgaactacgatctggagatgatggagacaatgggcttctgctccggcatcgagaactactcgcgccacatcgacgggcgctcgccgggcgagccgccctacacgctcatcgactacttcccgaaggacttcctctgcatcatcgacgagagccacgtgacggtgccgcagatccgcggcatgcacgagggcgaccgctcgcgcaagatcacgctggccgagcacgggttccgcctgcccagctgcctggacaaccgccccttgcgcttcgacgagttcgaagagcgcattccgcagttcgtgtacgtgtcggccacgccgggcgattacgagcagaaggtgtcgcagcagcaggtggagcagatcatccgcccgaccggcctactggaccccgagatcatcgtgcgcgggagcgcctcccagatcgacgacatcatcgacgagtccaaggaccgtgccgcccgcgacgagcgcgtgctcattaccaccctcacgaagaagatggcggaggatctgaccgaccacttgcttgaccagggcgtgaaggcgcgttacatgcactcggacatcgccacgctcgaacgcgtggagatcctgcgcgagctgcgccagggcaagttcgacgtgctcgtgggcatcaacctgctgcgcgagggcctggatttgcccgaggtctcgctcgtggccatcctcgatgccgacaaggaggggttcctgcgcaaccaccgctcgctcatccagaccatcggccgcgccgcccgcaacgtgtcgggccaggtcatcatgtacgccgacaagatgaccgactccatggcgcttgccatcgacgagacgaagcgccgccgctccatacagatgcagtacaacgaggaccacggcatagagccgcagaccatccgcaaggccatcaacgacatcatggactacgtgaccgacgaggtgggcaacaccacggccgagcaggtgaatgccgagctggccgcgctctcgcgcgaggaggtgctgcgcatcatagcctccatggaggacgagatggcctcggcgtcccagagcatggactacgaggaggcggcccgcctgcgcgaccaggtggtgaagctgcgcgcgagcgtggaaggcgcgagcgaggaggacgtgctgaaggacttgaagaagggcgcccgcaagggcagcgccttcggcaaccgcaagaacgccgcctacgggtcgagccgccgctcgtaggcgcgggaccggcgacggatgcgggggcatcgaaggccggcgagtaaaggggcaggggaaatgggcgggatatcggtcatggtcatgctgtcggtgatgggcgccgtggcgttcgtcatcttgggcatggtggcgcttgcgctggcgatgttcgtggcggcaaccgtggtgagcatcgtgttcgcgtgccgcgcgaaggcacggcgcgagcagggcaagcggctcaaaggccttgcggccgtgcccatcgtgctgtacgcggtgagcgtccccgtgctcatatggttcgcagtcgtgtgggtggtgccgctctccaccgatagagagggtgacgaattcgtcgacttctcccaagccgtcacgcggcacgatccggaggcgttgcaggcatgctttgacgccgatgagttcgcgttcccggaggagggccccgagtcgcttgcggctctgctgaagatcgcgcgcgactacgaggacgaggaatgcgcgtccatcgtcatgcgcgaggcaagggcagaaggcgtgttcctggcgcatgacggcccggtttcccttggtctgccggagtggtccgggcctgggcaggcgcccgaaaagggatcatcggacgcggcctgacctagcacctggaccgaaccgggcgatgggctccgcctgcccgggcgcgcagcaccagggcaggcaagcgccgctaggcctcggcttccgccgtctgcccgccggccgtctccggctggacggccggcgcatggtcgagggcgcgcacgctcttcggcagatacaccacgaggcccaataccaggcagatggcgccgtctaccacgaagaacggggcaactccgatgctctccgccaacatgccgccaagcgcgatgccaatgggcgatgccaagcccatagccgccatggacagtcccagcgcacgacccgtcttctcctcggccacgttgcgctggatgagcgtgatgagcggcccgttgaaccaggcgcaggcgatcgccatgacggcgcagagcgcaacgaacgcccagaacatgcttggtgcaaggaaaccgcaggccatggtggtggcgcctacgataagggccgccacgccgatgagcagagcgagtctcttgccgccgccccaggccatgagcacgatggagccgcacaccatgccgatgccgaacgcggcctccacgagcgaggccgcgtagccgtcgccgccgaagtggtcgaacgtcatgagcgggaagatggcgcccaggggcgcgaacgccaccatgcccaccgtcacgccggctatgaggataaccaggccgcggtttgccgacagagcgcgccagccgtcgcgcaggttcgccagcacgtgctggttctcggccgccttgtcgatgacggtgggtatcttcgccagggcgaggcccgccacggctgcgagcgcgccgaagaagtccaggaacatgacggtatggaagccgagggtggtgtacaggaagatgccgaacgccggagcgccgatggacgccacgctcatgagcagctggtcgagcgtgttgatgcgcagcagatgcttctcgggcacgagcagcggcatggcggccatcatggccggcccgtggaacgcctggccgatgctgcgcacgacaaccagtatcatgagcagggcgaacgatacctggcccaggaggatggccacgcccagcccgagcgacaccaagccgactcccaggtctgccacgatcatgacggtcttgcggttgtgcttgtcggcgatgacgccgccgaacggcgagagcaggccctgcggcaggtaggcgcagatggcggcggcagacagcatgagggcgctgccggtggtctcggtgatgtaccagaccaccgcgtagcctgcggcgtagctggttatcatggacacggcctggccgatccagatggtggcgatgacggcgagccagcgcttgggaagcggatggcccgcggcgctcagggtcatggcagattcggtcatgggagagagctccttcaaggtcgatgtattcgtcggccgcgcaacgggtgttggacggtgtgcatttcagtgtggggttgcgaacgcggccgcgccagccatttcggttggcaaaaggggtgcaacgggaagttgcgacgaggttcggcgcgcgtgggcgtgccgactactgaaatacgtaatacatcgaaacagagctccttggttggttccagtccgcacagtctactggcgcgtctgggccctgtcaagtacgaatgtgcggttttggggttcgaagccgcgctcggcgagggctgcaaccgatcgttgcggttgggatacggccggcaggcttcgggcgatgcggcgtcagcctgcggcggcgaagcggatgttcaggtccacacgggtggatatgccggccaccgtgccggcgctcgtgtactgccacatgacgaagtcgaactgcccggtgggcacggccatgtcgtactcggcgaaccacaccggacggccgtcgaggtcatcgccgccgaaccgggcgatgtcgcgcttgttgccgtaaacgagcgtgtcgtagcccgcctgctcgatgcgctcgcagaacgcgcgggcgcaggcggccagctcggggcccgtgaggcggttcgcgcgtccggcgttgtcggagacgggttcgtggtcgaaggcgacgggcaggtcgagggggcggccggccaagagcccgagcacgaagtcggcctcctcgcgggcttcgtcgggcgtgacggcctgcgagaagaagtagacgcccgtggccaggcctgccgccttggcgccatcgacgttctccgcgaagcgctcgtcggcgtacagcgcaccctcggtgtagccgcggttgcccgcgcgcacgatggcgaagtccacgccatcggccgccacggccggccagtcgatggcgccctgatggctggaaacgtccacgccaaggtcagaacgcagcgcgccgtcctcgtagtaggcgagccggtcgccgttgcgctcgaggcccgtccagtcgtaggggctcacgtatgcggccggcgccgcggcgtgcggggtgccggcgcaccgcccggccaaaaggcccgctgcgagggcgagcagagccagggcgaacagcccgatgacgacgcgccgcgacgacgcacgtctctgcaccggccgcggccggggtgcatgcgcccgcgcggtgtcgcggcgcgagggtcggggcgggagggttttgttcgtgttcatgccgtcatcctagcaaaccgctgcgcgctgccgccttcgcccccgcgcttcccatgcgaataccagaagtccccgattctcgccttggcgggtacgctcgccgcctccctacgctcccgcgccctgcgcgccgatgcggcgggcgtcggcctcgtcgaggtagtcgtaggccacgagcttcttaagcacctggtattgccgctggcgggcgaggtcggggttctcggagagcgcgtaggcgctcggcgcgtttggtatgccggccagcagcgtgcactcgcccgcatcgagttcctgcggctccttgccgaagtagcctgcgctggcattgccgatgccctcgtagccgtcgccgaagtagatggagttcacgtaaagctccagtatctctctcttcgtgaaatgctgttccatggtcagcgccatgaacacctcggccaccttgcgctcgatggtctgctcctgcgtgaagtactggttcttcgccaactgctgagtgatggtgctgccgccctctacgatcgccccggctttgaggtcgttcacgagagcgcggccggtggcgatggcatcgaagcccgggtgggcgtagaaccgatggtcctccacggccacgaccgcctgcagatacaggtcgggcagctcctggatgggcgtgaagccggatgcgacctctatgcgctgctccatctcgtccagcgggagcgcggccagggcctcgcggtactggttgaagccccgtgccacgaagaacgtggcggcaagcgccaccaggatgatagcgaagataagcaggctcccgacgagccgtgcgaccggccggtccggggtggtgcgctgcgtgctcggtgccatggcggtgcctttccctaaccttgtttccctatgctctctgttataccaagccttccttaacgcaaccttaccgaccgcttgcccgggccttacattcctgaaaggaagatcggcgaggatatgctaccgatgcgctatacttacggcggttgagcggctgccctcaggaggagacgggcgcgacggaacggtgaggatggtggcggacatgatgatttcgacgaaggggcgctacgccctgcggctcatgatcgatattgccagccgcgagcaggatggttcccccgtgaccatgcgccaggcggccgcgcgcgaggacttgtccgtgaagtacctcgagcagctgggcggtgccctggtgaaggccggcatcctgaagagcatcaggggggtgagcggcggctacctgcttgccaagcccgccgaggacatcactgccggcgacgtgctgcgcgccaccgagggcagctgcgcccccgtggcttgcctcgaggacggcgccgaggcctgtccgcgtcgcggcgagtgcgtggccgtgaacttctggcgcggcctggatcgcaccatcgaaggctacgtggacggcgtcaccctggccgaccttgtgaagatgggctgacacccgtccgcttgcggcagcgggcctcagaagtcccgcttttcgctcaggcgaaaggcgagccaggcggataccgcgtagagcacccgttagcggaatccgaccaagacggcaaccgagggcgtagaacatcttgccttgcatgggtgccttcttccttgaggcagggctttggggccggcggcttcggctagaagtcgcgccgtcggtaggcggcgaggcatgcagcgcaggatgcggcgtacagcgcgaaggcggctgctgtcagggcgcccgctgccacgaggaaggtctcgggcgacgtggcgatcgagacgagcccgccgaggggcgcaggcgccgcctccggcttgacgcagacgttgacgatcgggttgatgccaagcaccgacaccatcatgaccagcgccatcgcgtagcgcggcccgtttcccatgccgaagctgaagaacgtgggcagcatgattcccccgaccacgaacgcgagtgcaaacgacacggcaacggaccaggcgagcccgatcgcgtcgaagccgcccaggcggagcgtaagcgccgcatagcccggcacttcctgtacggccagcgtgacgaccaggtagagcgccacgcccatcagcgtgcccgccacggcgacggctgcgaggaacgcgtagcgcccgagcacgacgcccgtgcgggtgagcggcatggtcaggcggaaccggctccaatcgcgccgatcgtcgtagagcgcgagcgcctgcgcgaccgagatcacggaaagctctccgaaatacgggacgatgcccgggtggctgcccatcatgagggcggccaagcctcccacgcccaggagcaacagcaagtagcgccgcagcagcttcttaacggtgacgaaatccatcaggaacatcgctttcatgggcagggcttccttctcgtcggtcggcgcgctctggcgcccggcagaagcgccgcctgcctggtgagcggtgcaggcggcacggggatgctgcttagaactcccgcctttcgtacagcttcacggaaagcatgcacgagagcacggtgagcacggccatgagggcgatcaccgcggcaaccaaggtgacggtgcccgtcggcgtgctcgcccaagtggcaaggtcgaggacaaatgcgggcggggggccggccttctgcacgagcaccgtgccgatgggcagcaggatgatgaacgccagcggaaggtagcgcacggctttcgtcatgccgaagcgcgcgacgagaggcagggcgacgagccagagggcgagcgagaacgcgatggaggctgcaaccatgcccagcgctatctgccagtccatgccctcaaagaggccggcaaacaacccggtctgcggaagcgcaagcgacaaaccgtacacgatggcggtgaccgccatgcccaacacgagcccgaccagcgtcatgacaacgaatgtggcgtagcggccctgcacgacgttcgcgcgcgagagaggcagcgtgaggcggaagcgctcccagtcgttgcgctcgtcgaaggccaccagtgtgaagcccaccgagtaggccagcatgagcgccatgaggggcatgatgcacagggcggagccggtggataccgtgaggaccagggccaccaccacacccagaagcagctgcgaccgcgcgagcttcttggccgtcagcaggtcgaacatgagcatggtcttcatcggacctctcctttcagcatgagcgacatgtacgtttcgatgtcggcccgctccaatacgatttgggggaacctcgccgcgaacgactggcggtcagggacgaggacggtgatgccgtaggtgttgcgctcgtagtgcatccctccgcgggggaagaagccgctgtccacaatggcgtcaaactcggccgcgcggcactgggccacgccggccaggtcggtgatgacatccttctccaccgagaacacgatgcggcccgcatcgatgcacacgatgtaatccgcgattttctccaagtcgctggtgatgtggctggacatgaggatgccgcggctctcgcagcccatgtacaggcgaagcgtgtcgagtgcctcctcgcgggccatggggtcgagcccggccgtggcctcgtcgagcacgagcaggtcggggttgtgggccagcgcgcacgccagcgatagcttcatgcccataccgcgcgacaagtccttcaccgtcttgtcctggggcagctggaacgcatgagcgaacgtgcggaacgcaccagggttccagtccttgtagctttgggccatgagcttgctcactgtgtccaccgtgagctcctcggggaacgagcacgtgtcgaacaccacgccgatgcgctgtttgagctgggcaaggcgcctctcgggcgcaccggtcacttcctcgccgaagagcgagatggagccgccgtcggggcggatgagcccgagtatcgccttgatggtggtggtcttgccggcgccgttggagccgatgaagcccaccacgctgccggccggcacgcttaaggagacgccctccaaatcgaagccgtcgtagtgcttttccagattctgtatgcgcaaaaggtcgctcatcagtcgtcactttctttcgtggtcgaacggtctggggtgcagccctgcgggcgccatccccggtcagtcctccatgaggaggtcgagcatgtcgtggagctcgctcggcgcgacgcccgcgctgcgggcctcttccaccgcgcgcgtcatcagatcctcgatgtgcttcaggcgctcctcgcgcagaagctccatgttgccgccggcgacgaagctccccttgccctgcaccgtctcgatgaacccttgggcctcaaggtcggcgtaggcgcgcttcgtggtgatgacgctgatgcgcaggtcgttcgccagcgcgcgcatcgagggaagctgggcgccttccgcgagcgtgccgttcaggatgaggttcttcatctgggcggtgatctgctcgtagatgggcttgtcgcttgcgttcgagatgatgatgtccaacggtgctcctcgtcttgttctttgagggggcgcctggcgtcccaagcactcccggtggcggagccgcgacgtctcgccgcttcgccgacggcggggaaacacgttctttccccgccgcccgaaggtcccctaccttgcacctcgcctcacggcagtgtgcaaggtgtatataccctctatgcacactataaacaccttgcgtgcacactgtcaagggaggcagggagatttcacgggtattgaaagtactgccgcattacgttataacgaggtgtcggaggggtctcgtctgctcgcgcatgccgtccctgtcttcaaatgggctctccagctgcttgggaaaggacattggactcgtttgcgacattgccgatcttgtggaaatccggtaagggaaagaggttcttatatggctgacgtgctgttcttggagtacccgaagtgctccacctgcaagaaggcgaaggcatggctcgatgcgcacggcgtggcgtatgccgaccggcacatcgtggaggacaacccgacggccgacgagctggcggcgtggcatgcggccagcgggctgccgctgcggcgcttcttcaacacgagcggcatggtgtaccgcgagcgcaacgtgaaggcgctcctcgatgcgggcatgggcgatgaggaggcgtacgcgctccttgcggaggacggcatgttggtgaagcggccgctcgtggtgggcgagggcttcgtgctcgtgggcttcaaggaagcggaatgggagcaggtgctgctgggctagcaggtagtctggcggctgcggattcacacgaaaacatccgtcctggctccccctttgacgcatagtcgatgatcgcggtcgtgccgcaagcgcaaagctccttgcgcatgcttgcggcgattcaatatatgattgaaagggtaagggacaaaaaggttcggtaatctatagattttggacggaaatcaataggttctggatgcgacgtttgcgaaacgcctggtagcaggcccggtgtttaaactatcttttatccagaatagcgacaactgcccctttttgtccacggcaccgcataccccgcgcgtcgagcggctgcccctagggccacaacgcgcgaaggtcgccagattgcgctaatcgctgattgtgcgtcaaagggggagtaagagcatccgtcccgaaatacccggttgtgctgcggcgtatcagagctcgtcggtgtcgaggcagagcgtgaaggggccgtcgttcaccagggatacgtccatatacgcgccgaagcggcccgtttccacgcgggccacgtcgcggcgggcgcgctcggcgaaccactcgtagaggcggttcgcctcgtcgggcgcgccagcagcggtgaacgaggggcggttgcccttcctgcagctggcgtacagcgtgaactgcgacaccacgagcacctcgccctccacgtcggccagcgagaggttcgtcttgccgtcggcgtcctcgaagatgcgcaggcgcgcgatcttgctccataggcgctcggcttgctcctcgccgtcgccgtggcccacgcccagcaggatcagcaggccgtgcccgatgctgcctgccgtctcgccgtcgatgtccacctgtgcgctgctcacgcgctgaatcactgctcgcatggatgcttcccttcctttgcccgcgatgcacaggtcgcccggaacgcatgctgggatgcacgcaccgctgcgccgcctggcgtgcgttccgaggcgcttcgccagcttcgcatgctgatcgcggttttttaccgtccgacccagtataccggggtttacagtgggagcaggccggcgtataacgatctgcaaccgagcgaaggtggcccttgcgccgccgcccccgacgtaaggagcgaaacccatgacgtacgcgatcgtctacgacagcagaaccggcaacaccgaggaactcgcgcgcgctgtggccggggcgctgcccgcgcaggggtgcctggcgttcgggcgcgtggacgaagtggacgccgcctccatggcgcaggccgaccgcgtgtatgcgggcttctggacgaaccggggcgactgcaccgacgagatgggggagctgctggccggcctggcgggcaaggaggtgttcctgttcggcacgtgcgggttcggcgccgacgagacgtacttcgccggcgtggcggcccgcgcggccacccatctgccagagtcggcgcagatcgtgggcacgttcatgtgtcagggccgcatgccttcgagcgtgcgccgccgctacgagcacacggccgcgcagaacccggcgcaagccgcccgcatggcgcagctcatcgcgaacttcgacgaggcggccgcgcacccgaacgacgacgaccttgtgcgcctgcgcgccaaggtgcaggccgcgctttcggcctaaggctcggggccgccggcccccgagcacgtgcgaaccgctgcttccgcagcgagaaacggaggactcccatggcgaatctcaccgatatgccgaacatcggcccccatgtcgccgagcagcttgcccaggtgggcatcgcgacgcccgatgacctgatggccgcaggggccgagcaggcatggctcaaagtgcaggccatcgaccccggcgtgtgcctgcacatgctctacggcttggagggcgcggtgcagggcgtcccgaagaaggagctcgaccccgcccgcaagcaggagctcaaggcgttcatggatgcgaataggccggcgtaggggacgcgccgcggaggatctgcccgcgtccgcaggaacgccgcgcaacggcaggaagcccccgcagcgcccggcgcggcgcgggaaggagcgcggccggcgtggcggggggcttcggtggaaacgtcgtgctgattgtcgcacgacaaaatggtatgctgtgcaggagcctgcgccggcgagtgcggcaggcggcggagacggcgagaggggagcggtggtcttcggcgagctcatcgtgtggtacctgttcctcggcggcaccgccgccgggagcttcgcggtgctctccgccatcgacctgcacacggccttctcgcgtgcgaacggcccgtgcctcgcccgcgcgccccgcgggtatcgcggccgccgcgcgtgctcgatgacgcagcggcgcatcgcccaaacgggctacgccgccgccttcgtcctgctggtggcgggcatgctgtgcctgctggcggatctcggccggccggaggcgttctacttgctgttcctctatcccaccggcagcttcgtgtccgtggggacgttcgccctcacgctgttcggggcctgcctcgtcgtggcgctcgcggaatccgtgctcacgttgggccctgcgtgggaaagggcggcgcttgtcgcgaaggcgctcggggcggcgctggccgtcgtcgtgatggtgtacacggggctgctcctgaagagcgtcgttgccgtggacctgtggcagtcggcgtggctgccggtgctgttcctgttctcggcgctctcgtgcggttgcggcgtcgtgctctcgtgcacctgcttctgcacgtccttcccgggcgtgctcgcgtgggtccgggggctggccgtcgcggatgccgtgttcatcgtgctcgaggcgctcgcggcggcggcatacgcggcgacggcgaatgccgcgagcgccggccggccgttcgacgcactgcttgcgggagatcagtccggcgtgttttggctcggcttcgtaggatgcggtatactggcgcccctggctatcgaggcatccgcgttggccgcccgacgcagccatcggggcagcgtcgtcgccgtgttggcggtgctcgtcctggtcggtggcctgagcctgcggttcgtgctcgtgaacgccggcgtccaaaccgcagtgtgagaaacgacgggaccgatggcaacgaaggacatacccccctttaccttgagcgaccagagcgatctgccgctgtgggtgcagctgcgcgaccgcatggcgtacctcataaactcgggtttctaccagccgggcgagaagctgcccaccgtgcgcaagtacgccgccgacctgcgcatagcctacaacacggtgagcaaggcctacatgggcttggagcgcgacggctacgtgaccacggtgcgcggaagcggcgtgttcgtcagcgacccgggcgcattcccccgtgagggcggccaggcggacctgctggtcgaggagttcgtgaaaagctgccttgaagaggggatgacctacgacgacatccccaagctcgtgtcgaagcacatacggaagatgaagaggaaccatgaagagaagcaataaagagcgcatcgcgccagacgtgcgggactcctaccgccgttcggagatggagttcggcgtcgctgccgacgcctatcgctccgatcccagcaggaaggccacgcgcaacggggccgtgatggtgacggtggtgctcgcgctggccgccttccttgcggtgctggcactgtggtacgcggttgcggggggcctgagcctcgctggcatcgccgtcgcgctcgtcgtggggctcggggtgctgtcgtcggtccacgtgtgcctcgaatgggagcgcgcggtgatcatgcgccttggccggttcaaccgcttggcgggcccgggcatattcttcagcgtcccgctcatcgagttcagcacgctgcgcgtggaccagcgcacgacggccacccctttcggggccgaggaggcgctgaccagcgacctggtgccgctcgacgtggatgccgtgctgttctggatgatatgggaccccgagaaggcctgcatggaggtggaggactgccgcttcgcggtggcgctgaccgcacagacggcgctgcgcgacgccatcggccgcgcgtcggtgtccaacgtggtgatgaggcgccaccagctggaccaggagctgcaggaggcggtggaggcgaaggtcaccgattggggcatcgcggtgctgtcggtggagatccgcgacatcatcatcccgaaggagctgcagggggtcatgtccctggaggcccaggccgaatgccgcaagaacgcgcgcatcacgctcatggaggccgagcgcgatgtgtccgctatcctgcaggaagtcgcggaaacctactcccacgacgagatcgcgctctcgctgcgcaagatccacctggtgtacgagggcatgcaggacaacgagggaaccgtcgtggtgccgagcgcctacagcgagggtttcacgctcgacccgagcaaggacgccccgaaggctaacggaaaccccgcgacttagttatacctaaaatagtataaagacagcaaaaattgtcgtgcgacactcttgattgtcgcacgacaattttccataataggcgacagagggatcggccgatttcctgcattgaacgcatccgcgcggccaccgtgcgcgcgcccccttcctgggaggtgccgcgtgcgcgctgcgagggcgtggcctgtgccatcgtggcgcgcgccgcaacaagaggcgcctgcagagggcgggcgttatgggaagaggaggcttgagcatggggcttgaatctttgtatttgttcactatgctgggaggcttggccgccggcgcgtacgcgttcgatgccggcctgcgccgcacgcgcgaaggcagccgtccatggctggttcccctggtcgtcgtggcgctgttcgccgtgggtatggttgcggccaccacgcacgtgcacagcattccgcgtgctgtcgaatcggtgttcggcggtacggtcaacttcgggtccggcatgatccaggaagtcgccgttgccgggtgcttcttcgtgctggcggccatcgacctggtggtgacgctcgtccgcaagagcagcccctacgcgctgcgcgtggtgggcgccgtcgtgggcgtgatctgcatggttatgatgggcgtggcctacatcgacatctacggcaaccccgtgtggtgcaacgccccggcgaccatcctcacgttcgttgccggcgacctggccatgggtttggcgctgttcgccgtgttggcttcggcggactacgcgggcaagctgctgcgcttggcggccttcatcgtgaacgccgtgctggccgtggggctcgttctggaggctgtcgcgttctcgggcgagggcttcagcccgatcagccagatcgcgggactcgttatcgcgccggtcgtctccgtcgcgctcgtggcgctgtcgtcgaagatcaagaacaagaaggcgcttgcgattgccgtctgcgtcgcctcgatcgtcggcgtcgccatcgcgcgctacgcgttttacgcaacctgcacggtggcgtagggaagcaaagggggattcatcgtgagcattcaatccaagaacatttctcgtcgcggctttctgggcgcgtcggcggcggtggtcgcgagcgctgccctgctgtcggccacgggctgctccgcggaggcgagcctcgatgccgccgacaagcacgagctgcccgtcgacccggccgagggcggcgagtgggtggcggccgcatgctggcacaactgcggcggacgctgcatgaacaaggtcatggtcaaggacggtgccgtcgtgcgccagaagaccgacgacacgcacgaggactcgccggactacccgcagcagcgcggctgcgtgcgcggcaaggcccagcagcagcagtgcttcggcgccgaccgcctgaaataccccatgaagcgcaagagctggtcgcccgagaacccgaacggcgagctgcgaggcaaggacgagtgggagcgcatcagctgggacgaggccatcgactacatcgccgaccagttcaagaccatcaaggagaagtacggcaaccaggccttcctcatcggcagctacggctcgcgctatgcgttttctccgcttctggcctatggcgggcacacctccgtggcggactccacgtcccacgggcctacctgctgaacacggccgataccatcggcatcccgcggacggacgcgggcgtgtgcaacgaccgcaccgacatgctgaatgccgagaccatcgtgttctatgcgtccaaccctgcctggtcggccgccggcacgccgagctaccactacatccgcgccaaggaggcgggcgtcaagttcatcacggtcgaccccatctacacggcgtccgcccagatcctcgacgcgtactggattcccgtacgcaccggcacggatacggcgttcatgctgggcgtggcctccgagatgctgcgcctggacaaagaggagggcaacgtcgtagactgggacttcctcgacaagtacacggtgggcttcgatgccgaccacaagccggccgacctcaaggaggacgtgaacttcctcgactacctgaacggcgtctacgacggcgagcccaagacggccgagtgggcctcgaatatctgcggcgtgccggtggagaagatcacctacttcgcgcgcgagatcggcaaggagcatgacgtgtggatgcttcacaacttcgccgccgcccgctgcaacgggtccgagaacgtgccccagctgttcatgacgctgtccgccatgggcggtcactacggcaagccgggcaactgctccgccagcaactaccatgccaacgccggcaacggcggcccggctctcgtgaaggccggctcttccggcctgccgagcctcaagaaccccatcgagggcgttatccccggcccgcaggtgtgggaggcgtgcttcacgggcaaataccgcaacgtgggcgactggtacagcggcaagggcgcccaggcaggcgtcgacgagacatgcgacatccactgcatcatccacgacgagaacgcctacctgcagaccgggcccaacatgaagcgaggcatcgaggcgcatcgcaagatggacttcgtgctgtccaaggcccagttcctcaccacccaggcgctctactccgacatcgtgctgcccgtgacgacgcagtgggaggttcccggcggcctcgcttcctcgaaccgcgagttcctttactgcttctcccaggtcacggagccgttgtacgaggcaaagaccgatgcccagatcaacgcgcttatcatggaggcgctggggctcgacccgtccaccgtctaccccatcagcgagaagcaggcgttcttcaaccagatcgccggtgccacggtgatcaaggaggacggctcgggcaagtacgagccgctcgtcaccatcaccgatgccgacctgaaggaatggggcgtttccggcaagccgcagacgggccgcgtgggcctgcaggagttcgtcgacaacggcggctaccaggtggagcgcaagctgggcgatgcctacagctcgttcatcggctatgccgactacatcaaagaccccgccgccaacccgctgaagaccaagagcggcaagctggagatcacctgccaggccaaggccgacctgttcaacagcatcggcctcatcgaccgggagtaccagccctatcccgagtacctcgtgcccaccgtgggctacgagaccaccttcaaggacggcaagatcgacggcgaggcgggcgagtacccgttcctcatgttcaacccgcactacttcaggcgctcccacagcgtgttcaacaactgcccgtggctgcgcgaggcatgggcgaacccggttttcctgaatgcgagcgacgcggaggcgaagggcatcgcggacggcgataccgtgcgcgtatggacgaagtacggcgaggtgctgcgcaaggcctgctgcatggagaacatgcggcccggcgaggtgggcatcccccacggcgcctgggtgcgcgttgacgaggagacgggcatcgaccacggcggcgcggacaactacctcattggcaacgatatttccggcggtggtttgaccagctacaacaacaataactgcaacttcgagaagtacgagggcgcaccgctggaagacgactgcgacaccgacaagcgcatcatcgagcttggctagggaaggaggagcaaccatggctgttggattttaccttgatatgacgcgctgcattggctgccgcgcgtgccaggtggcctgcaaggacaagaaccggctcgaggtgggcacgctgtaccgcgaagtgcgcagctacacggtggggtcgttccccgaggtggacggctacagctactcgttcggctgcaaccactgcgaggaggccatctgcctgaagaactgcccgacgggggccatctacaaggcgcccgacggaacggttgtgcaggaccagagcaagtgcatcgggtgccgcatgtgcgtcatgtcgtgcccgtacggccagccgaagtacttcccggatgagggcgtttccggcaagtgcgatggctgctacggcctgcgcgaggccggcggcgagccggcgtgcgtggcgggatgccccaaccgcgcgctcaagttcggcgaaatggacgagctgcgcgccgagttcggctccgacttgaacgagggcggcatcgccgttctgccgtctccggacgagacgcacccgaatatcctcatcaaggcgaaggactgcgcctttgacgagggataccgggagcttacctggtaacccacccctttcttgccgcgtcgcagaccccctccctgcggcgcggcaacctttttgccggtgcagccgccgacccgcccggctgctacgagagacgggagaccgttatgccgaacgaggagcgcgagagcgcgctagcgatggggctggcccgtcgcacgtacctgtaccgcctgttccacgtggtgttcgggagccgcccaaccggcgagggcgtcgcgaaggcgtttggcggcgagacgccggccatgctcggctctgtgggcgatgcgttggccggggacggcttcgcggacctggcggggcggacgctcggctcgtccggacgcagccttgccgcgtgcgccgaagatgcccgtgcctgggccgagcgggcgcagggcgaagcgggcgacccggagcgcgccgaggccttcgcttcgcgcctgcgcgcctcctacgaccggctgttccaggtgcccggcgagcattacgtgcacccgtgggaatccccgtatgcgggcaaggagtccgtggtgttccaggagagcacgctcgacgtccggtcgttctaccatgcggcaggcttcaagctgcgagcggagaggcgattccccgacgaccacatcgctgctatgatggactaccagggcgccttgagccaacgcgcgtacgaggcgttcgccgacggccgcgacggcgaggcggtccggacgctcgcgacgcagcggcaatttgctgatcggcacctgctgaactgggtcgaccagttcgcagccaaggtcatcgagaacgatgcccaggggtgctacggcgcgctcgcgggcggcatggcggcgttcgttgcgctcgaccgcgcgatggccgagcaggtcgaggcggagctggccggttcggagtaggcgggtccggtcgggccggccgggcgcgatgcgccggccgcccgcgccgccgaagggcagacgtttctacaggagggcaccgtggatcttcagggctataggcaggcgttcgacgaggccgagcgcgatttcgaggccgcggtagaggagtacggcctgccgttcgagcgcgaggagacctccctgcgcgaggcgcgcgtgcgcacggcggcagagtgcgggtgccgctgcgagaacggcgcctcgtcgctgtggcgcaactggatatcgcctgcgtgcctggcctgccgcaccggcgacgagacggccacgttcttcgtcgacctgcggtgcgtgaagaagtgctatttctgcttcaacccgaatcaggaccactacgagcacttcctctcccatgagcgcgacatcgtggcggagctcgagcaggcgcatgccatgggcgcgcggttccgctgcctggccatcacgggcggcgagccgctgctgcatcccgagcaggtgaacgccttcctccagcgagccgcccagctctacccggacgcccacacgcgcctgtacacgtgtggcgacctgcttgacgagcgcggcctgcaggagcttgccgaaagcggcctggacgagatccgcttcagcatcaagccgcccgacgcgggcgacggccgggaccgcgtgtacgagctcatggagcaggcggtgggcacgattccggccgtggtggtggaggtgcccgtgataccgggctcgctcgggcagatgaaggacctgctggtgcggtcagacgccctcggcatcagcggggtcaacctgctggagttctgctttccgctgcacaacgccgcagagttcgcgaaacgcggcttccagctgcgcaagcatcccttcaagtatctctacaactactggtacggcggcggggtgccggtggccggcagcgaggccgaggccttggagctgctggcgttcgccgagcgcgagggcctgcggctgggaatccactactgcagctcggacaacaagaacaccggccagatataccagcagaacaaggcgttcttcgtggacccggcgctgcgggacgcgcacccgtggatgcgtgcggacgaggaagaccggttcctgaagtgcgcgaaggccttcggggaggatgcgcgctgggcgagggaatgggccgagggagctggcatggtttgcggctacgacccggacgtgccgagccttgcgcttgcggacgacgacgccgcggcgctggaggaggcctgcccgtccatcgtcctggccgagagcgtgaacgtggtggaggagcgcgagccggacggcgcgcccagggcgggacgcgccggcgcgcgccccgccctctacctgagggaggtggccgtcgagcctagagcttgacgtgcccgaacgtgacgatggagtagacgagcccggcgatgcccagcgccaccaccacggccacgatgaccttgtccgaggtcttggcgagcagcttcgccttggggtcgtgctggcgcacgcccacgatgtagagcggcaggccgacggcgtacacgatgcacgccaccatgaggtagttcagcccagcggcgtagatgagccacaggccgtagagcgagcccgccgcgccggtgaacacggccatgttccggctggcgaagatgccctccgggtattctttcttgatggcgatcttgaacaggaagagcgtgcagaacaggtagcatggcagcgccatgacgctggtgatgctgatcatggtggtccaggcgttgctgccgatgaagaacgagataacgagcacgatctgcacgatgatggtggtccacagaagcgcggtggagggcgagcccttcttgttctccttcacgaacgccttggggaagattccgctcttcgaggcggccagcggcatctcgcccagcatgagcatccacacgagccaggagctcagcaccgacacgatgacgccggcgttcaccaggatctcgccccatttcccgaacttgtccagcatgatggcggccatggacgggtcggccatggcgccgacgtcggcctgcgagtacacgccgagcggcagcagggacacaatgatgtagagcgcgagcgtgaccagaaagccgatggtcgtggccttgcgcacggcggcctgcgacttcgccttgcccgacaccacgacggcgccctcgatgcccaagaacagccacagcgtgacgagcatggtggcctgcacctgcggcatgacgttgtcccagctgaacgtcaggtcgatggtgcccttcatgccccagaagccctccatgaacacggagaacttgaacacggtggccaccgcgatgatgaagatggccacgggcagcagcttgccgatggtgccgatgatgttcaggaagctcgtggacttcgcgccctgcagggccagcaggtacatgatccacgtgatgatggagccgccgatgatggacgggatgttgttgccgcccgagaagtcgggcacgaagtagttgagcgtggccatgaccagcaccgagtacgccacgagggcgaagcagttgcagatccagtagccgtaggccacgaagaagccgatgagcttgccgaagcccttctcggcgtacgtgtacaggccgttcgtgagctccgggcgcgcggccgagaggatgcggaacgtgttcgcgatgaaccagatgccgatgcccgtgaccacccaggcgatgatgatggctccagcggaggcgtccgcggccatgttctgggggaggttgtagatgcctccgccgatcatggcgctgatgacgatgccgacgaggccgatcagccctaccttcttcgagctgtcggataccttggcggcgcttccgctggaaccggtcgaggtattgtctgccatgattccagtccttgtcatgagaggcgcgcccgctgggaggcgggcgcgcagcgatcttcgttgcggcgggggcaacgggcgcccgccgtcatgcgataggggagctccgcgctacttcgcgaggttcgtgagcgactcgaagtccatttccttcagccagtcggagaggttcaggtcgttcagcgacgtgaagcccgtggtgggcacggcgttgcgggccagcgtgacgtaggggcccacggtgatggcgttgccgatctcgcccggcttcatcatgcggtgcgcaaatcccacgtacgtgcggtcgaacagcacgttggagtcgcggccgcactccaccacggaccagacgatctccttgcggtgctgctcgaggaaggccatcatgtcgtcctcgttgtcgttttcggtccatacgccggcgtcctcgatgaacaggtcggcagagaagtcgcggtcggcggacagcgagatggcgatgaacgaccagatgccgtaggcctcgccggccttgagcgggcggttctccttcgggcggtaggcggtgacgcccttgttggcgcagatggtgtgcgcgccggggatgggatggtagcgacggttgttctcggtgccgaacagctcgacgccggcgttcagcagcggggcggcgtcgaacaccttgagctcggagccgtcgaactgcttctcggtgaacagcggctggctcttgcccgacgtgatgtcgtcgtggcgggcgaggtcgtagccccacacctggccggtcatgccgcagaacgaggaagccgtgagcatgttgatctggccgatgtaggcatcggccgtctccgccttgtcgtaggtgacgatggtgtcgatgagcgcgtcgttggtcttctccaccgtgccggccgacaccttcagcacggacacgtagccgttgccgtaggcgcccggcatgccgtaaccgtcgcagtaatcgtcataagggctgatggccgtcttgtcgatgtgcggcgcacgcatgctcgcgtggtagttcgcctcgcgggcgatggtgcggttgcggcgttcctcgatgttcttcaaaacaggtctcctttcgcaggtgttcgattcagcgccgattgtagggcccgagactcgcgtttgatttcgcataacggttccgaaagggagccgtgcctttcccgatggcggatcgtcgcggggctgaaacggaggcgttgactgctcatgacggcttgaccgacagcggcagtgctggtatattacgactgtcatataacgtatgttatgttgagggggcggccatgccggagcagcgggtgggcagggagcaggtgctcgacgcggcgcttgccgtcgtgcgcgagaagggcgaggcggcgctgagcgcgcggtcggtggcacagcgggcggggtgctcggtgcagccgatctacagcctgttcggcgacatgggggagctggtgcggcagttgtacggccacgcccgcgcctgggtcgcggcgtacaaccgcgagcacgagcacgacgggtgcaacgccttcgagtccaacggcctttcgcacctgcggcttgcgcgcgaggagcggccgctgttccacttcctgtacctgtcgccccatatggaagcgacgggcttcgaaggcgtgtacgagagcgtcgccatcgatggcgtgcagcagtgcatcgaggagctggggcatctgtcgcccgaggcggcgcgcgatctgtacctcgacatgatcgtcttcgtgcacggcatggcggcgatgctggccacgggcgcgcagttctccgacgaggagctgcacgcgcgcatggatcgtgcgttcaaggggttcgtcgcgctggtgcgcgcgtgaggggccggatgccaagcagcctcgcatgaggtgcttggacatcgagaaaggatgtcacggcttccttttccccgtaaagcaggacgcggctgcggcctgcaggggaagccgccacgaccgggcgatcgaaaaacgtagaaaggctttgcaatgagggagacgatctcgcgggggcagaagcgccaacggatacggcggctgatgctgctcgcaacgttcttgctgttccccataataatcttctacttctcgccggtgctcatcatcgagggtgcgctctcgggcgtcgtggcggccagcatgctcgtgttcggcctgcagttcttgacggccatcgtgctgcgccgcgcatggtgcggatggctgtgcgcggcaggcgggctgcaggagcttgcggccaccgccgtgggcaaaccgtcgaggcccgcctggctcaagcgcgtgaagtacgccatctgggtgccgtgggtgctctccatcgtcgcttgcgcctgggtggcgggcggcttcacggtggtggacccgctgtacggcatcccgggcggcgtgtcgatgaacaacccgctgggcctgcccatctacttcggcatcgtggcgctgttcttcgtccccaacctcgttctgggacggcgcgccatgtgccacggcatctgctggatggcgccgttcatggtgttgggcgagaagctggggagcgcgctgcgcgtcccgcagctgcacgtgagcgccgaggccgaccgctgcatcggctgcgggaagtgcgaccgcgcctgcccgatgagcctgccggtggagcagctggcgaagggcagcgcgatcgttgatgccgagtgcatccagtgcgcggcgtgcgccgacgcctgcccgaagggcgtgctcaagctgcgggtggggaggctgcgatgagcgggctgctcgcgtagcaaccaggctgcgcgcgggttattccggcaggtcgacgagggcgtaggtgtcaatgtcctggcgctgatggagaatgcggtacaccgtcagtgccgtgtcgtcgcagcggtagtacaccgtgtacgggcttgccagcaccgttcgatattcccgatggtgaagcccgtctattgcgaagcgcccgcctgcatcgggaaatgagcgcgcatgttcgattgcagcgtcgacgcgctggatcgccgcaagggcggcttgcgggtttttgcattcaagtcccaggtagatggcgatcgactcccgatcgaggttggcgcgcggtctccaagcgagttcgagcatgatcagtccccgttcgaagggtagtcgaggttccagagcgcgaagatctcgcgcatcttcgcttcggaatcgtcggcgttgagggtttcgggacggtatttctcttcgatttctgcctcgcggagcgctaggtaaacacggttgcgccgttcggtcgtttcgtacgcgttgctgtccatgagcacgaaggaagccacgccgttcttcgtgagcacgatgggctcttgcagctcggtcgcctgggtgcacacatcgttgagctgcgtgcgcaggtcggtaataggcctgatgacgggtagcggtgcggcgagagcggacatgatgctcctttccatgttctttattcagtacataatagcatatataataaggtatatgaagggttgcaagaggacagagcatgttcgcgcttgactctgacgttgcgtgagggtgtaggctgtcgatgcgatcgcgaaaggaaggaggcgcccatggagcgcgagcgggcggagcgcggctacacggtgcacgagctggcggcgttgtcggggtgcacggtgcgcacgttgcaccattacgacgagctggggctggtgcgggccgggcgcgcggcgaacggctaccgacgctacgggcccgccgaggtagaccggctgcagcaggtgctgctgtaccgcgaggccgagatgccgctggcggacatcaagcggctgctggacgacccggcgttcgacgcgcgcgatgcgctggccgggcatctgcgcgagctgcacgcgcgcaaggagcgccttgacggactgatcgcgagcgtggagaagacgctcgccagcatggaaggagatggcccgatgaaggacgaggagaagttcgaggcgttcaagcaaggcctcgtggacgagaacgagaagaagtacggcaaggaggtgcgcgagcgctggggcgacgatgccgccgacgcgagcaacgcgaagctcatgggcatgaccgaggaacagtaccgcgccacgcaggagctggagcgggagatcagggacgtcctcgtggcggcgatggagacgggcgacccggcaagcgaggaagcgcgccatgcggccgatctgcaccgtcaatggctgtgcgctttctggaaggacggcacgtactccaaggccgcgcatcggggcctcgccgagatgtacgttgccgacgagcgcttcaaggcctactacgaggcatgggcccctggcgccgccgagttcctccgcgacgccatcaaggctttctaaggcaacctgcggcccattcgttgcttgtgcctgcaggcgggccatcctacactgctgcccatgagcagaatcgcaacgtccatgaagtccgtgctgcacacctcggcgcgccgtctcgccgcttgggtgcgcgcgccgttcgccagcctgtaccgggttgcggcggcggtcctcgccgcgggggcggtgggcctcgcgctgccgccctgggtcggtttgctgctgttcgccccggtggcggcgaccgtcgggacgaaggtcgcgcatgccgtgcgcgccatcgcctcgctatgctacgtgggcgtgggggagaaccgcgagggacacccgacgctcgacgtgcgccgcgatctgctgcagcgctcccgggcgctcggcacggcctcgctcgctgcgggcgtggccgtgctgctcgccgcgcgggcggccctgaccctgttcccgagccttgccgaggacggcgtgctcgccccctacctggtgttcacggcggtgctgctgggcggcttcctgctgttctacacgctggcgctgcggttcgactcgtcggtgctgcggggcctcaccagcatcgccgtcacgctgccggtgttcttcatcgtggtggcggtggccagcatcctgctgtcgtgggccatgggcgtgctggcgggcttcggcgtgccggccgagggcctgctgcaaggcgggttcgcctggctctacgagatgcagcgcctcctgggtgcggccgtcggctacttcctgcggcaggataccctcatcgtcggcgtgtccatcgtggcagccgcgctgctgttgctgctgtatgcctactcggtgccgctctactggctgcgcagcgtgtcgcgctggctcaagagcatcggcgtggccgcggccgctttcggcgcggcggtcatcgtgttcgcgggcgtgtggctggccgacgtgcagcatctggccgagcaggcagcggcggggcgtctgggcacgggcctcgacgccggggtggccagcagccaggcgcaggccgtcgcgcaataccgctcggacgacctcgttgcgctcatcaaggcgttcgtgttgccctacacggtgggcgtgttcgtggcgaacggcgtggtggcgtggcgcaagggccgcgccaagcaggcggccgacggcatcctcgacgacttcgccgccgcgggccacgtggacgaggcggcgcttcccgagcaacgcaagcgctacctctactgcggcggcagccccacgctctgggatattgccctgcgctccatcggccatgacgtgcctcttccccatcccttcgccccgcgcaggctcacgctcaaggagcgcctgaccggcgtgctggaggatccgccgcccgagagggcgcccgagcagccgcccgacccgccggccgagcagccggcttcgtccgcttctgccggcttgccagacgaagtcggcatgcgcaccgactccaaggccggtcatgccgagggctgcaccaagaggaatgagccaagacaggctctgcaataagaggggagggaggacaaggggccaggtccttgtctcgtgcgtcgcgacgccagggttcgtcggggaatccgtgggcgtgacggcccctgctgcttcgcgcttgggcgcgggcgagcatcggtgatgcggcgaaccgatggctattgtgcgtgcagaagcgcccggatgcacagtttttaccagattattgcagaaggaggagttcgaggggcgatttgtatgcctcgacggcatcgcggtgccttttatcggcggtgttttccctgatcgcgataaggccgacgatgcaaaagcccccgcaagcgctccaagcatgcagaaaactggtaaaaactgtgcagaaaagtccgtgggggcccgaatttgaagaacctgcgcgggctgttcgcttccggcatgccggtgccgtatgatgtgtttcttgtctgacgggacggcaacgcgcccgcctcgcctcgcgccttgccgttgccgttttgtatagtggccccatgaagaaatccgaagcgctcaaaaccctggggctggccgacggcgccaccgacgacgaggtcaagcaggcccaccgcaagctggtgatcgcgcatcacccggacaagttcgccctggactcgccggagcgcgccgaggccgaggagctcacgaagcgcatcaacgaggcccgcgacgtgctgctgaaccgttcgtggacccccgagttcgacccccgccgcgacccgcgtccctacgcgaacaacccctacgcgcaccccggtcgccccggatcgtccgccgcgccgggcggaccggccggccaggatcctttcgccggctggcccttcgcgggaggccagggctcgccgttcggccagggccagggcacgggccccgcaccaggccgcaccacctacgtgtggacttcctgggatggcacccgcacggccggcggcgatccgggcgtcggcgggcccttcgacccgttcgaccccttcgcgcccttccgcgccgccgagccgcgcaagaccccgcagcaggtgctggccgaggccgtgcgctcgctgcgaagcgaggcgctcgccgtggcgggcaaggcggccgtgctcgctgtggccgcgctgctgggctcggtggccaccggcctgttcttctacgtgatgatatcgctcgtctggggcctgtggaagcggctgggcagctgcctcatcggcttcatcgtgcccatcgcgcttctgggcgcccccttcgtgttcctcatcgcgccgcgccagggcgccgtgaccgtcggcttggccgtcttcttcctcgcggccgtgctgttcgacgccgtgaacctgcgcaacgccctgcgcgcctaccgtgccgccaaacgcgccgcccggccgtagggcctcccctccacgacctcgtgctatactagccgctttaggaaacgttcgcgggaagggtccggttgaagaaagcgctgctgctcgttatcggcatcgtcgcggtgtgcttcctcatcgcgaacgccgactacctggcgagcttcctcgccaccctccagaccggcgcgctcgtgccgctcgtggtggcgtgcgcgctgatgctggcccgccacctggtgcaagcggcctcctacgacgcggcgttcgaggccgtcgggcataaaaccggtttctggcacaacgtcgtgctcatcttctcgctcgtgttcatcaatacgttctgcctgttctcgggcgcgacgggcgtggcgttcatcatcgacgacgcgcaccggaggggctgtgacgccggccaggccacctcgggcgccatcctctcgcagatcggctacttcgccgccatcctcgtgatctcggtcatcggtttcgtcaccatgctcgtgtccggctccatgaacacgctcttcctcgtggggggccttgcgcttgcggccgtgctggccgtgctgtcaagcatgttcgtggcgggctaccgcaagccgcgcatcctgttccggctgtttttgggcctcgagtcgctcatcaacaagctgctcggcctgctgaaaaggcacctcaagcccggttggggccgcaagacggccggctcgttcatctcgtcggcgtccatcttggcgaagaacccgcagggcacgctcgtcaccgtggcctatgcgtcgttctcggccatcctcaacatggcgtgcctcgtggccatcggctacgcgttcggcttcacccacgtcaccgcgctcgtggcggcgttcgcggtggcagccatctcggtgatactgagccccacgccgcagggcgtcggcgtggtggaggccgccatcgcggccatcctcacggcccatgggtgctcgctcgccacggccacggccatcgcgctcgtgtaccgcggcatcatgttctggatgcccttctgcatcggcgccgtgctgctgtcccagtccggcttcttcgccgacaagaagaacccctccgaggagcagcgcgcgaaggacctcgcctggatatccggcacgctcgtgctggtggtgggcctggtgaacctgggcctggccctcatccccaagtcgttcgagccgttcaccgtgctcacggagtgggtgaacatcggcggcgtgctcatcggcccggcgctcatcgtgggaagcgcggtgctcgtcgtgctggcggtgggccttatcctgcgcttccgcacggcgtgggcgctcaccatcggcgcgctcgtgctgcttgccggcgccgagttcctttacgtgaacacgtggcaggtggccgtggctgccgtcgtgctggtggtgtggctgttctggaagcgctccgcgttcgaccggcccgtggtgctgaagggcgacgcggcgcgcatcgcccgcgagttcggcgataacgtggcccggttccgccgttggcgcgccgagcgccgcgcccgccgcgacgcctcgtccggcgcgccgattgccggatcggacgacctcgacgagcttgccggcgcccgagccggtgcaccggccggccccgggtctcgcctgcgcaccgccgcgcccgccgggcatcgcgcgcgcggcacgagggcggccgagcccccgcgcaaaacaagttgggaacagcaggccgaaaagggcgcgctgctcatgcggcaggtggagcaggagggtatactggcagacgaaccatctgcgaaggaggagcaacgcccatgatagtgctcgacgagccgtacgtgtccgaacccctggtcgattggctggagcagtcgcagcatcccgtgctggacaacgatgtggccgccgcgctcgccgcggggggccgccgtctcaacctggtgggagaggacgaggccgcccgccgtatcgatgcgggcgagcgcgtgtacacgaactccgagaacgcgctggcatggatcgcggaccatacggccaacacgtccctcgcgcgtgccatcgacctgttcaagaacaaggcggccatgcggcgcgcgctggccggcctcgatcccgacctgttcttcaagacgtgctccatcgacgagctgttcaagttggatttctcccgcctgcccgctccgttcgtgctcaagccctccgtgggcttctgcagcgtgggcgtgtacgccgtggcagaccgcgaggactgggagcgtgcgctggccgatatccagaagaacgccgcgagctggcacgacctctatcccgagagcgtcatcggcacgggatcgttcatcttggagggctacatcgacggcacggaatacgcgctcgacgcctacttcgacgagcagggccgcgcgcgcatcctgaacgtgctgcgccacgacttcgcctcggccgaggacacgtccgaccgcatgtacgtgacgagcgccgccatcgtgcgcgacaacgccccggcgttcgccgcctggctcgaccgggtgaacgcgctcgtgggcgcccgcaacttccccgtgcacgtggaggtgcgcgtggacgagggccacgtgtgccccatcgagttcaaccccctgcgcttcgcaggcctgggaggcacggacgtcagctggtatgcgtacggctaccgcacctacgaggcgttccttgagggcgtccagcccgacttcggcgcggcgttcgccggcaaggaggacaaggtctactccatgtcgctgctcaacgcgcctgccggtacgaaaggcaacgagcgcttcgactacgatgcgctgcgcagccgcttctcgcacgtgctcgagctgcgcccgttcgacgtgggccgcgtgggcaactacggcttcctgttcctggaaacggatgccgagacggccggcgagctcgatttccttaaaaacacggacttgaaagagttcctccgctagcggcgggggcgttatgggacggaacgggggcaggccttgaagctgagcgtgcgcaacctgctcatcgggctcgtcatcgtcatcgtgctcgccgtggtgctgctgcgcggcgaccagctggtggaactcgtggagaccatcaagaaggggtcggtgatcccgctcgtcgccgccctgtgcacgcagctgggcaagtacttcgcgcagagcttcgcctactcgttcgcgttcgaggccgtgggcgagcgcatggacccgcgctccacgctgccgctcgtgttcggcacgttcttcatgaacaccatcgccccctcgctcaacctcgccggcaccacgctcgtggtggacgacgcgcgccgccgcggcatcccgccggggcgcgccacgagcgcagccctgctcatgcagatcaccgtggactcgggcttcgccaccatcatgctcgtgggcttcgccatcctcgcgttcaccgtggggctctcgccgctatggttcctcctgggcctgttggtcatcgcgctcgtcacggtcatggtgctcatcctggtgctcggccgcaagcgcccggcgctcgtgctgcgcgcgctgcgccccatcgagcgcttggtggaccgcatccgcgtgcgcttcaagaagccgccgctggactcgtgggtcgagcgcacggtgggctcgttctccgacgcggccggcctcatcgcccacaacccgaaggccaccgccaaggcgttcggctgctccgtggtggcctccctgtgcgagctcgcgtgcttctcgcttgtgggcgtgggcttcggcgtgaccgtgcccgaggcgctcatctgcggctacgtagtggccacactgttcgccatgatatcgatcaccccgcagggcgtgggcgtggtggaggctgccgtggtggtggcgttcacgtcgttcggcgagtcgagcgcggcgggcctgtccattgcgctcgtgtaccgcggcatcgtgttctggttcccgttcttggtgggcgccatcctcatccagaccacgaagtccttcaagcaggaagcgaagaagaccgtgcgcaccgcccgcaagtccgaccgcatgcgcaccgtcgaaggacaggccaggcgcctggacgaggcgaaggcgcagggcgcgcctgtctcgggcaaggcacggcccgccgcccgctcgccgcaggagcaggccgctggcgcgccgcctgcttcctccgagccgcgcggccgctgaccgtccgcggcgcgctgtacgttttccaacctcaaaaactacgacaatcgggggtttacgccatgcgcgggttcgccatgctatagaatagcgggatggtagcatatcgcgggccgcaggcccgcttgcagaacgggggcagtatggaacgtgggaagcttttcggcgccgtcgcaacgttcgcgctggcggggatcttggcctgtgccggatgcgctgggggtgggcagggcgcggcgggcgaagccggcaaggcgtcggtgctcgacccggccgaccccgtgcaggtggagctctggacgtactacaacggcacgcagcagcaggcgttcgaggatctggtcaaggagttcaacgcgggtcgcggcaaggatacgggcgtcgtggtaaccagctccagccagggaggcgtgaacgacctggccgccgccgtcaccgactcggcgcaggagctcgtgggctccgaggccatgcccgatgcgttcctctcgtactccgacaccgcctcggtcatcgacgggctcggccgcgtggccgacctgtcggcctacctgaccgacggcgagttggcccagtacgttgacagcttcatcgaagagggcgacatcaacggcgacggcagcctcaaggtgttcccggtgggcaagtccaccgagacgctgcaggtcaacttgaccgactggcagaagttcgccgatgccaccggctcgacgctcgaggagctctccaccatcgagggcgtgacgaccgtggcgcagcgctactacgagtggaccgacgcccagacgccggacgtcgcgggcgacggacgtcctttcttcgggcgcgacgccatggcgaactacctgatcaccggctcgcgccagctgggccatgacgtgttcgacatcgacggcggcgtgtgcacgctcgacctcgatcgcgccaccatgaagaagctctgggacaactactacgtgcccatggtgcagggctggttctccgccgagggcaagttccgctccgatgccgtcaagacgggcgacctcgtctgctatgtgggctcgtcctcctcggtggtgtacttcccgaagaccgtgacggtcgacgacaatacgagctatcccatagagctggccgcgttggcgaaccccacgttcaaggacggcaagccgtgcgcgccccagcagggcgccggcttcgtggtgacgaagtccgacgagaagaaggaagccgcctgcgtcgagttcctgaagtggttcaccgacaaggagcagaacacggccttctccatcagcgccggctacgtgcccgtgaagaaggacgcgctcacgctcgacaacctgcagaaggctgccgagtccgtcgagggcgcatccgagaactacctggtgaacctgccggccacgctcgataccatcgaggcgggcgtgtacgccaacccgccgttcaagggcggtgtggaggcgcgcgccgtgctggagaaggcgctgtccagcaaggccgtggccgaccgcgcggccgtgacggccgccatcgagggcggcgcggcgcccgaggaggccgtggcgccgtacctggaggatgcggtgttcgactcctggctggccgacctgaccgcatcgctcgaagcggcaatggcctagccagaacgccttcggcgagggccggggaagggaaaacgacggcggcatgggcctggaaacgggaaaaaggcggggcgcgcggcgcggactgacgttcaaggtcctcgtcgtggtgcccttctgcatagccctcgccatccagggcgtcatgtgcgtggccgtgctcgcgggcagcgaaacgctcgagcagatggaggcagacgcctacgacctgttctccgagcgcgtttccagccgggcaggctatcttgagaacgacatgatattccgctggtcggatttcgacgtggtcgtggacgatgtgggcgacgacatcgattccgccctcgccgcgcacggtgcgtcggcgaccgacatcgccacgggatccgacctctcgcttgccgtcatcgacgcatcggccgacgacctgctgtcgttcgcccgccgtgccgaggtggacggcgtttacctcgtgctcgcggacggcgcggtcgacccctcctccgagggggacggtcatccggcgctctacatccgcgacgcgaaccccaaagtggacgtggcgaatggctccgaccttcagctggcggcgtgccccatcagcgtggcccgccggctcgatatcgcgctcgacagccagtggtcggccgcgtttccgctcgccgccgagggcgagggtcagagcgctttctactatcgtcccctgcgtgccgcccaacagtaccccgatgccgacacgagcgacctgggttactggggacggcccgtcgacctgggatggacgggcacgcagtccgtcacgtacagcaagccggtgagggacgccgcaggcaatgtcgttggcgtgctgggagtggaggtacggctcgaccgcatagcctccttcttcccgtacctcgacctcaacgagggaggcaacggctcttatctgctggccgtcacgggggaggacggtggtttcgcgcgcgacggcggcgtgtcgccggcaaccgggcaaccacgcacctacgaagtgctcacggccacgggtgcatcgcagagcctctacgtggaggacggctcgttcgaatcgtccctcgacgagaaggggcgcatgacggtggagccgtcggaggccgcgtcgtcggccgcgcgtgccgccgccagcgcggccgagatcaagctctacgacagcacgtcgccgttcgcctccgagcattgggctctcgtggggctcgagcgcgaggacgacctgttctccgccgcgcaccttctgtccgagaacctcatgaaggtgttcgcggcctccatcgtggtgggcatcgttgttgccgtgctcacggcatggctgtcgtcgtcccgcctgcgccacctgatgggggaggtgcgtgccgcaagtcccgaacagcctatctcgttcacgcccaccggcatcgtggaggtggacgagctgtccgagtccattgagctgctgggctccgaggtggcctcggcagcctcgcgcctgtcccagatactcaagctgtccgatcgctccattgccgcgttcgagtgcaatttcacgtcgtccgtcgccacgtatacggatggcttcttcgatgcgatggggctcgtgctcccgtcgggctcgggcgagcagggctccgcgcatgagggctctctcggcggcgccgtgccgctcggagcattcgaacggcttttccagtcgcttcgcccgcgctacgagcaagagtccgacggtcgctggatcgtctcggatgtcgacggccggcgctgggttcgcatcgtcacgttggagagcgatgacggaacgcgggtgttcggcctggtggaggatgtgaccgacgagatagccacacgccgccgcatagagcacgagcgcgaccacgacgtgctcacgggcctcttgaaccgccgtgctttcgagcaggccgtcacggagcgcctggccggcatcccgccggcgttcggcgccatgctcatgctcgacttggacaatctgaagtacatcaacgacacgtacggccacgattggggcgaccactacatcaaggccgcggccagcgtcatcgagcgcacgttcgagggcgagggcttcttcgcgcgcatctcgggcgacgagttcctcgtgttcgtcgaccgctgcgctgacgccgatggggcgtaccgcctgttcgactcgttcatgcgcgcgctcgacacgagcgtgctcgaggcacccgacgccacggtgctcaaggtgcgcgcatccgtgggcgtggcgttctatcccgaggacgccgtggatttctcccacctgcgcgaatatgccgacttcgccatgtacgaggccaagaaccaccgcaagggcgcgctcctgcggttcgaccgcaagagccacgagcggggggcgttcatcctcaacaacaaggaggacctgaaccgcctgctcgacgagaacctcatcgactaccacttccagcccatcgtggacgcccgcatgggcgaggcggtggcctacgaggcgctcatgcggccgcagcttccctccatcgccacgccggaccgcgtgctgctgctcgcgcgctcgcagtcgaagctctaccgggtggagcatctcacgttcttcggcgccctggaggcgttcgccaagcacggggacgccgctcgcggggccaccttgttcgtgaacagcattgccacgcagcgcctgtcctccgatgacgaggtggagctgcagaagcggttcgggcccctgctcaagcacctggtcatcgagatcacggagagcgactacagccgcgagatgtcgctgtacaaggagggcctcgcacggcgctggggtgcgcggctcgctatcgacgatttcggcagcggctacaacggcgagacgtcgctgctcgactaccacgccgacttcgtgaagctggacatgggcatcgtaagcggcatcgacgttgcgcgcgaccaccaggacatcgcccgcaatctcataggctacgcgcatgaccgcggcatacgcgtgatagccgagggcgtggagacgccctccgagctcaaggccgtcatcgggctgggcgtggactacctgcagggctacctcataggcaagcccgctgccacgccgccggccgtgcccgccgatatccaggagctcatccgcacgctggccggcacgtcctgctagaagggagcaccatgaccctcaccgacacgctgcatatcgagaccgtctccgctggcaagcgccacgtggaggcgttcatgcccatcacccccgacgtgctccagccgcacggctacctgcatggcggcgcaaccatcgcgctcttggagacggtggccagcatcggcgccgagcagggcaccgatttcgaacgtgaacgccctttcggcgtcgatgtgcgggtgcgccatcgcaagggtggcaggaagggcatgctgcgcggcgtggccgacctcgaccgcgaggaggtctcggagcgcaccggtgccgtgaagcagtactggaacgtggcggcgtacgacgacgcgggcgacgtggtgtccgacggcgtggtcatgaccaagatcgtgcccctcgcgtacctggaggcgaaaggcgagggaggcgcgtgaggcgtcgcctttcgtctccctccttgcccaagacgggtgcgctttgtcgcccagggcgcatccatcggcctctcctacgggggaggaagcggcttcgagcggcctcgaccaccggtgaagaagacgtggagggggaaatattgccacattttcttttaccttcgattacattgtgctatcataaccgtcgctgcaacaagcagcttacgggttgtggctcagcttggtagagcgctgcgttcgggacgcagaggccgcaggttcaaatcctgtcaacccgaccagggagctaaagggatgtaactttcaaggagcatcccttttttgcatagtgtgtgctactctgacggcgttggagtgggcggggcgcgctgcggtggcggcccgtaagacaagcttggaggaacgtatgaaaatcctgggtatgggcatgccggagctgctgatcatcctggcagtcatcctgctgatcttcgggccgaagaacctcccgaagctcggcggcgcgatcggcaagaccgtcaagaacctgcgcgagggcatgggcggcggcaaggccatcgaggaagccgaggacgaggacgaggaagtcatcgaagaggtcgaggaagagaagccggcccccaagaaggctaccacgactgcgaagaggaccacggcggcgaagaagaaggccgaatagcctggcgctagcgaatcggttcgcggtatgtgcagacggctcggccgggcacataccgcttttttgtatatcggccgacactccgtcggagcactcacgtacagagataaaaagccgcacgtccgacaaccgggcgtgcctgttgtaggtatcggacaggtgagaagcatggcaaacgacaacttcatcctcacgcaggagggcaaggaaaagctcgaggaggaactgcactacctcgagaccgagaagcgcgccgagatcggcgagcgcatcaaggtggcgcgcgagttcggcgatatctcggagaactccgagtacgacgatgccaagaacgagcagggcatgatggaggcgcgcatcgccgagatcagccgcatcctgtccgaggccaccgtcgtgagcacgccgaagcgttccagcaaggtgaacatcggctccatggtcacggtggacatggggggcaaggagcgcgtcttcaccatcgtgggcggtgccgagagcgacgcggctgccggcaagatcagcaacgagtcgccggtgggtgcagcgctcttgggccacaagaagggtgacaaggtggagactacgggcccgaccggccgcgacatctccatggtgattctgaagatcgagcattaggaagttccgtcggcttggcggccgccggaactcgccgacgactgcggttccggttccgtcggcctggcggccgccggaacccgccgacgctgcggcccgccctcgcacccgatcttcgcgcgatgtcgcgggcttgcgtaccgaagtacgcggcgcccgcgccatcccccgaatctcgggcacgagggcgggcctcgctgacttactacgccaacctgcgcggttggttttcgcgcttcgcgcgaagggctcggcccgtgcgggcgagcccgctctgcgagctggacgagattgaggggcaccgaactatgagcgacaccaacgacacgacgggcaacgggcaggtcatcgaggacgatcccatcgcggtgcgccgcgcgaagcgcgaggcgctcatcgcggtgggacgcgacccgtacgggcacgcattcgcgtactcgcaccacttggccgacctggccgcccagtacgagggcctggaggacggcgcatccacctcagacgaggtgaaggtcgctggccgcatcatggccaagcgcgaccagggcaagctcgccttcctcgagctgcgcgactcgacgggcgacatgcagctgttctgccgtatcaacgcgctgggcgaggaatcgttcgccgagctcaaggacctcgacgtaggcgactggatcggcgtcgtcggcaccatgatgcgcacgaagcgcggccagctctccgtggcggtcgagtccttcgaactgctgtccaagagcctgcgccccctgcccgagaagttccacggcctggctgacaaggagacgcgctatcgccagcgctacgtcgacctggtaatgaaccccgaggtcaaggacacgttcacgaagcgcttcaagatcgtggccgccatccgtcgctttatggaggatcacggctacttcgaggtggagacgcccatcctgcaccccatcctcggcggcgcgaacgcgcgccccttcgtcacgcaccacaacgcgctcgacaaggacttctacctgcgcatcgccaccgagctgcacctcaagcgcctcatcgtgggcggcttcgagaaggtgttcgagatcgggcgccagttccgcaacgagggcatggacccctaccacaaccccgagttcactaccatggagttctaccaggcgttcagcgaccttgagggcatgatggagctcacgcagggcgtcgtgcaggccgcggcgctggccgcatgcggcaccacgcaggttgagtaccagggccagcaggtggacctgggcggcacgtggcgccgcgccaccatgatcgagctggccagcgagggcgcgggggaggacgtgagcttcgcgcgcacccgcgaggagctggtggccatcctcgagcgcaacggcggccatgccgaggacgcgtggggcaagggcaagctcatcgccgagatcttcgaggccgtggccgaggagaagctcatccagcccacgttcgtgacggagcatcccctggaggtgtccccgcttgccaagaagaaggcgggcgagcccgagctcaccgagcgcttcgagctgttcatctgcggccacgagtacgccaacgccttcggcgagctgaacgacccggtggaccaggccgagcgcttccgcaagcaggtggaggcgaaggacctgggcgacgacgaggccatgggctacgacgacgactacgtgcgcgcgctcgagtacggcatgcccccggcgggcggctgcggcatcggcatcgaccgcctggtcatgctgctcaccgacgccccgtccatccgcgacgtgctgctgttcccccacatgagggacgaggcccctgcaggcgggcgctcgcgcgctgccgcgccggttgcggccgcgccgacggctgtcgccgacgctcctgtggccgcgcccatcgacttctcgaaggtggtcatcgagccgctgctcgaggacgaggtcgatttcgacacgttcagcaagtcggacttccgcgccgtgaaggtgaaggagtgcgcagccgttcccaagagcaagaagctgctgcagttcacgctcgatgacggcacgggcgccgaccgcgtcatcctgtccggcatccacgcctactacgagccggaggagctggtgggccgcacgctcatcgccatcaccaacctcccgccgcgcaagatgatgggcgtcgaatcgtgcggcatgctgctctccgccatccacgaggagcccggcaaggacggccagcccgaggagcgcctgaacctgctcatggtggacgaccgcatccccgccggcgcgaagctgtactagcgtcccggcaaaagcaagctcccaacgaaggccgccctcgcacccgctcgggcggccttcttgcgtctaagacgccccagcgcacgggaaacccggtttcgtggcaggttttgacgatagttgatcattcgagatgccggaagccggctgctgaaggctccttctcgaagggcattcgcaaagggccaggtcatgttcatgtctctcaaaccggtgtgcctgaccgaaaaagccgatgataaactagcgccattttctgccacgagcgtggcgaatcgccgcgcgcgaggcggattgcgctcagccgagcagctcccttcggagggcgagctggcgcgcggggtattcggagcagacgggcctggccctcgtgccgaggtgcttcgccagcgccttggcgaaccggttgtactcctggtagttttccacctgtttccaggtggcggtcaccaccgtgaatccgagtgcctcgagcgcatccttgcgggcggcgtcctcggcgatgcgctcggctccggtgtggcagagcgtgctgtcgtactccacggccacacgctcatcgggccagataaggtcgcagcgcaaatgcgagcggccggtgacccagcggctgcgctcgggtatggggacgacagcgttcatcaaggggtgcttgatgccgcttcctccgcgcagacagggaagggtcacgagctcggccagcgttgattcgcgcggcgaggccgagccctccatgatgtgggggagggctgtgcgcagggctttcgctcctcgaacgccgtcgagttttcgcaggcaggacgctattttctccggcgaggtgagcggcttcctggcccctgatccgtaggggcggctctcgtcgggcgcgaacgtgccgcagaactcgtatccgaggtgggcggttcgtgggaggctcgagcagcggcagccggacatcgcgaggtgcgctcctgcgaaaaaccccgcacgtgtcagaacctcgtcagaagtgagcacttttggaggcatcggggggcacggcagcgcgcagccggaggtcgtgataggatgaacgggtcgccgccgcctgcgcttgtggagcgagcgtgtgcggccatatgcggcattggcactctcaatacaagagtgctaagatggcacggaaccatacgatagactctgcgagaatagaggctagcatgtcatttgagaagtttacggacaaagcgcgcaaggtgctcgtcctggcgcaggacgaggcccgctcgctccaccagccctacgtgggcaccgagcacatcctgctcggccttatacaagagaaggacggactggccgcccaggccctcgaccgcaagggcgtgaagtacgacgccgtggtgcaggctatccgccaggtggtggccatcgacgaggacaccgacgtgtccgggcatctctccttcacgccccgcgtcaagcgcgtgctggagaacagcctgcgcgaggccatgcagatgggccaatcctacatatccaccgagcatctgctgctcggcatcgtgcgcgagggcgacggtaccgcgctcgaggtgctcacgcgcctgggcatctccggcgacgacgtgcgcagcgcgctgaacgacctcgtggggcagagccccgtgtacgccgggcgcaacgcgttcgacccccaaggccaaggctccgacagcgtgctcaaggagttcggcaccgacctcacgcagaaggcgcgcgacggcaagctggacccggtcatcggccgcgcgggcgagatcgagcgcgtcatgcaggtgctctcgcgccgccagaagaacaacccgctgctcatcggcgagccgggcgtgggcaagaccgccgtggccgagggcctggcgcagctcatcgtgtcgaaccaggtgccggacatcctgcgcgacaagcgcctgttcacgctcgacgtgagcgcgctcgtggccgggtcgaagtaccgcggcgagttcgaggagcgcctgaagaagtgcatcaaggaggtcatggacgcgggcgacatcatcctgttcatcgacgagatgcacacgctcatcggcgcgggatcggccgagggctccatcgacgcggccgccatcctgaagccgccgctgtcgcgcggcgagatccaggtcatcggcgccaccaccatcgacgagtaccgcaagcacctggagaaggactccgcgctggagcgccgcttccagcccatcaccgtgggcgagccgaacgaggagcaggcgctgcgcatcatggagggcctgcgcgaccgctacgaggcgcatcaccaggtacacttcaccgacgaggcgctgcaggcggccgtgacgctggccgaccgctacatccaggaccgcttcctgcccgacaaggccatcgacgtgctcgacgaggccggcgcccgcatgcgcatccgcaacatgacgctgccgaaggagctgcgcgacctggacgaggacctgcgcaagctccgcgccgagaaggacggcgccatcgccgcccaggacttcgagcgcgccgcccagctgcgcgacgaggaggcccagctcaaagacaagcgcgcccaggccgagaaggactgggaggagaatgcccagaagaccatccagcaggtgacggtggaggacatcgccgacgtggtgtccatgaccacgggcgtgccggtatcgaacctcaccgaggccgagaccgagaagctgctgcgcatggagagcgtgctgcacgagcgcgtcgtgggccaggaagaggccgtcacggcgctgtcgaaggccatccgccgctcgcgctcgggcctcaaggacccgaagcggcccgccggctcgttcatcttcctgggcccctcgggcgtgggcaagacggagctctcgaaggcgctggccgagttcctgttcaactccgaggatgcgctcctgtccttcgacatgtccgagtacatggagaagcacagcgtgtcccgcctggtcggcagccctccgggctacgtgggcttcgacgagggcggccagctgacgaaggccgttcgccagcgcccctactcggtggtgctgttcgacgagatcgagaaggcgcaccccgacgtgttcaacatcctgctccagatcttggaggagggccgcttgacggacgcgcagggtcgcacggtcgacttccgcaacacggtcatcatcatgacgtcgaacgtgggcgcgcgcgagatcgcgcagccgacgacgctcggcttctccaccgaggagcacgcgggcctctccgacaaggagataaagagccgcgtcatgtccgagatgaagaagctgttccgtcccgagttcctgaaccgcatcgacgagatcatcgtgttcaagagcctgaacgacgagcagatcgccgagatcgtgaagctcatggtggccgacctgcgcgagcgcctgatcgcgcagaacatgtccatcaacctgaccgacacggcgtgcaagctcatcgccaaggagggcaccgatgccacgttcggcgcgcgcccgctgcgccgtgccatccagcgcttgctggaggacccgctgtccgaggagatactcgagggcaagtggtccacggggtcgatcatcgacgtggacgcagtggacggcgagctcgtgttcacccagggctcgggcgttgtcccggagccgcggaagcgcgacagcatcgcgcgtgatgccgagctgctgctgacgaactacgatctgggccatgccggcgtgcgtggcggcgggtcgatgtcgggcggcgcggcggactagcgctccccctgaaaagctcccctgttccctgggctcgcatctggcgcccggggagcaggggtttcttgcgttctggacccgcatttgtcgtatactggggaaacgctgattgctgcatcgttcggcccgtttgcggggcatgggctctgcccttgccgacgacctgcgacgggccgcctgttgggcggcaagggcagagcccatgccctgcggcgcctatgcgagcttcgctcaaccgaccgactacaggaggttctatgttcggagacaacctcgatcgcatcgtgaagggcatcgagaagaactacgaggccgacgagatattcttcacgaaaccggggcggcagtttcccagccgctcggccgtgaagggggttctcaaggacttgcggcgggtgctgtttccgggctatttcggcgacgagatgctcacgccgtccacgagtccggagtacttcatcggcgagacgctcatccagatcgagcgggcgctgcgcgagcagatcgtcctcgccctcgcctacacgtccgacgaccgcgacgccgaggaggccgatccggcccgctcgctgtgcggcgggactcccgagcgcatctgcgatcgcgcctcggaggtgtgcacggtgttcttcgacgagcttcccagcatccagcgggtgctgctcaccgacgttcaggcgctctacgacggagatccggccgccggctcgaaggaggaggtcatcttctcgtatccgggcctgtacgccatctacgtgtaccgtatcgcgcacgtgctctaccagcagaacgtgcccatcatcccgcgcatcatgaccgagctcgcgcacagcggcacgggcatcgacatcggcgcgggggccgagatcggcgagtacttcttcatcgaccacggcacgggcgtggtgataggcgagaccaccgtcatcggcgaccacgtgaagctctaccagggcgtgacgctcggcgcgctgtccacgcgcggcgggcagcggctcgcgggggtgcggcgccatcccaccatcgaggatgacgtgaccatctactccaacgcctcggtgctcggcggcgagacggtgatcgggaaggggtcggtcatcgccggttccgcgttcgtcacctcgtcgatcccgccgcattcccgcgtgtcgctgaaggcgcaggagatcaccgtgcgccaaccgggcgagcgggactaagtccgcgggcgcagcgggcggggcggaaacggaacagcgcaaggcggagaggaagatcccatgaccaagacaatcgatcccgtgttctcgtcggaggtgctgcgcgcgcctgagctggcgtgcgacagcttggacatcgacacgatcgcgcagtcgctgcacgggctgaagggcgaggtcgacaagaacccgcagaccgcggccatcatactggccggcggcacgggggagcgcttcggcaaggagggcggcaagcagctcgtggagatagcgggcaagcccatcctcacctggtcggccgaggccttcgacgcggtgggcgacatcgggctcatcgtcatcgtgtgccccgaggaccgctgcgacgagtacctcaagcgcgccatcgacccgttcccgttcgtcacgcccatcgtggtggcgccctcgggtcccagccgccaggaatcggcgttctcgggcctggagttcgtgccggacgactacgagtacgtcatcctgcacgacggcgcccgcccgctcatctcgcccgacctcatcgcgcacaccatcgccacgctcaagggcaacatcgactgcgacggcgccgtggtggctcacccggcggtagacaccttgaaggtggtggagaacggcgtgatcgtgggcacgcccgatcgccgcgtgttctggaacgcgcagaccccgcaggtgttccgcgccggcatctaccgccgcgcgcacgcctcggcgctctccgacggcttcatgggcaccgacgactcctcgctcatcgagcgcttgggcggccgcgtgctcgtggtggagggcaagcgcgacaacatcaagctcaccgtgcctgaggactacctcatgctggccgccgccgtgcgcaccaactacatgaagggggcagaggaatgacgggctcgttcgatccggcctccctgcgcatcgggcagggctacgacgtgcatgcgttcgccgaggggcgccggctcgttctgggcggcgtggacataccgcatgcgcgcgggctcttggggcactcggatgccgacgtgctcgcgcacgccattgccgacgccctgctcggcggcatccgcgggggcgacatcgggaagctcttccccgacaccgacccggccttcaaggatgcggactcgctcaagctcttggccgccgtggccgacaaggtgcgcgaggagggctacgccatcctcgacgtggattccgtcatcgccgctcaagcgcccaagctctcgccgcaccgcgatgccatgcgcgcgaacctggccgccgccatgggcatccccgtggagaacgtgggcgtgaaggccaccaccaccgagcacctgggcttcgagggccgcgaggagggcatctccgccacggccgcgtgcctgctctgccgatgtagctagaaggccggttccttcgggaagccggcccgctcggcccgctgtgctagaatttcaggttgacgcgcgcccgcatggggcggcgtttcggacaggcaggatgcgaggacactctatgatcaggctctacgacaccaaggtccgcgagaaggtggacctcgagacgctcgagcgcggcaaggtcggcatgtacgtgtgcggccccaccgtgtacaactacatccatgtgggcaacgcgcgcacgttcatcagcttcgacaacatccgccgctacctcatgtggcgcggcttcgacgtgaagttcgtgcagaacgtcaccgacgtcgacgacaagatcatcggcaagtcgctcgaggagggccgcccggccgccgaggtggccgccgagtacaccgaggcgttcatcgaggacatgcgccgcgcgaacgtgctcgaccccgacgtgcgcccgaaggccaccgaggagatccccgagatgatcgagctcatcggcgagctcgtggacggcggccacgcctacgaggtggagggcgacgtgtacttcagcgtgcgctcgttcccggactacggggcgctctcgggccgcaacgtcgacgagatggagggaggtcaccgcgagctgcgcgccgacggcaagggcgtggaggaccgcaagcgcgacccgctcgacttcgcgctgtggaaggccgccaagcccggtgagccggcgtgggagtcgccgtggggcatgggccgtccgggctggcacatcgagtgctcggccatgtcgcgcaagtacctggggctgccgttcgacatccacggcggcggcggcgacctcgtgttcccgcaccacgagaacgagcgcgcccagagcgaggccgcgtgcggctgcacgttcgcgaaccactggatgcacggcggcatgctgcagatcaactccgagaagatgagcaagtcgctggggaacttcaagctgctgcgcgaagtgctggagacgacgcgtcccgaggtgctgcgcttcctcatgctgcagacgcactaccgcagccccctcgacttctccgccgaccgcctggacgaggcagcctcggcgctcggccgcatcgagaacgcggtgaagaacctggactggctgctggccaacgccgaggacatcccctcgccgctcgacctgcgcgctctcatggaccgcacgcgccaggcgaagatgggcttcatcctggccatggacgacgacttcaacacgtgcaaggcgctgggcgaggtgttcgacttcatcgccgacgtgaacgcccagacggcgggcaagacgctgtcgctgtccgacgtgccgcccgtgcgcgacgcccgcgcgctcatcgtggagctcatgggcgtgttcggcatcgacgtggaggccgccgccgacgcggcggacgaggcgtcggcgtatccggccgaggtcgtggcgctggccgccgacatcgccggctacgagggctcggatgccgccgaggccgtggatgcgctcctggccgcccgcgccgacgcccgcgccgccaaggactgggcccgcgccgacgccgtccgcgacggcttatgcggcctcggcttcaccatcgaggacaccccccagggcgcccgcgtgacgtacgaagggtagggcggcgtcaaaggattcgcatgcgaaggacggctccgaggggccgtccttttcgtgtcggaagttttccggttaggggacaagggggcggttctcttgtccctctccttggattttctcagggaagcggcgctcccagcaggaaatcgtacaggttcacgtggcgcacgccgtcgcggccgtagtcggtgcggtctttcgtgatcagcacgcgagggaatccgtctgagagcttggcgaagggggtgagctcgcgttcgagcgtggtgggatcgagcacggtctcgctcacctgaacatagctaatgcttctcccgtgctgcacgacgaaatcgatctcggcgttggggagcgttccgacgctcacgtcgtatccccggcggatgagctcgaggaacaccatgttctccgtcagatggccgcggttgccggcgcgcagccccaagacgcggttgcgaaggcctgggtcgacgacgtagtattttccgttcgtgcgcaggcgctccttgccgcggatgtcgtagcggtcgcagcggtagatgaggtgggccttctgcatgagcgagaggtagttgtcgatcgtctcggcgctcactctgtggccgcctgccctgagggccttctcgatagccgaggcggaggtttggttgccgacgttgtcgagcacgaacgaggccacgcgcgcgaaagccgcctcgttgcgaatccttccgcgcagcaggatgtctcgcgtgaacacggagtcgtagatgccgtcgaggatggcgtgcttgagggcgtcggtgggggcgagcgccacggcggggaagccgccttcccgcacgaggagctcgtaggcgtcttcggccgcctggcgttcggagacgtcgatgccgacgaactggcagagctccgctagggaaagcggcaggacgtgcaggctcacgtaacggccggagaggtacgtcatgtcctcgcccgagaacatcctcgcgttcgatccggtgacgtagatgtccagcccgaattccgcgcgaagcccgttgatcgtcggttcccagcgatcgagctcctgcacctcgtcgacgaacaggtacgtagggccctcgcggttcgcacgcccggcgatgtgggcgatgaacgcgtccggatcggtgaggctgctgttcgaggggagctcgaagtcgacgtagatgatggagtcgggggaggtgccgccttccaccaggtcgttgcggagctgtctcatgagggtcgacttcccgcaacggcgcacgccgacgatggccttgacgagctcgggggccttcaagtctttgagcttgttcatgtaaagagggcggcgaatcataaaggctccttgctctatgggtgattttaggatagcaggttttccggttagcacttggaaaattatcgaaaatgaaaagttttccaagtgctaaccggaaaacttctctatttttaaagttatccggttagcacttggaaaactcgtgatagtgaagccttcctccgcgcttgagcttttggcgatgggtcgcgccgccgtcgtcctgcgctacaatacggcgcatgcgaaatcagacggcacatatccccgaactcctcgcgccggccggcgggcgggcgcagctggaggcggcggtgcgcttcggggcggacgccgtgtacttcgcctgcgatcgcttcgggctgcgtcagcgcgcctcgaacttcgcgctcgacgacgtgccggctgcggtggcctgtgctcatgcggccggcgcgaaggcctacgtggccgtgaacgcgctcatggacgccgacgatgtggcggcgctgcccgcgtacctggaagcgctcgacgcggcgggcgctgacgcgctcatcgtgagcgacctcggcgcgttctcgctcgcgcgccggcacgcgccgcatgcggacctgcacgtgagcacgcaggcgggcgtcatgaacgccgaggcggcccgcatgtggcacgagctgggggcgagccgcgtggtgtgcgcccgcgagatgagcgtggaaggcatcgcgcggatgcgcgccgacgcgccgcgcgatctggaactggaggcgttcgtgcacggggccatgtgcatggccgtgtcggggcgctgcctcttgagctcggccatggccggccgctcgggcaacagggggcactgcgcccagccctgccggtggagctacgcgctggtggaggagcagcgtcccggcgagttctacccggtggaggaggacgtgcgcggcacctacgtcatgaacgcgcaggacctgtgcatggtggagcacctggacgatctggccgccgccggcgtggactcgctcaagatagaggggcgcaacaagaaggcgttctatgtggcttcggtcgtgcacgcctaccgccgcgtgctcgacggggccgacccggccgagggcgcggccgagctcgcgtgcgtgtcgcaccgtccgtactcaaccggcttctactacggggccgccgagcagtcgccggaatgcgacggctacgtgagggagtgcctgcatgcggccgacgtgcgcgtatgcgcccccgccgggcacggcgcctggcgcgtggaggcggtgtgccgcaaccgcttctgcgagggcgacgagctggaggccgtcgtgcccggacgcgcatccttcagcgtgcgggtgcgcaacctggcctggctgccgcgacccgatgcggacgatccgcaccccgcgcccgtccccgcagctgtggcgaaccgctccgccgaggcgtacgcgttcacggtcgccgaagagctctccccgggagacttcctgcgcataaggacaccgtaggcgatctcctcgtcatcccatcagccggccgagagctcgtgtgctaggggagctgtccggcgcatacggcaatccccgaggttgaccgcatgcgccggggcggccgtctctggtcgcatggtttcggctggctgatatgaggggggacctccggttggtgcgggaagggcggcatcttcgtcatcgttgagctttgcgcccctcatctgcgccgaagcgatggatacctgccatgtggccgtaacggcccggcctcggcgccgcgctacactgggctgcaccaatcgaatcgagggcgctctcggcgcccccttaggaaagcgaggtgcatcatgcccaaccatgcctatcatgccacggcggcaccgggcgtcgtgcaacgggctcgcagcacgaaggccggccgcaagcttgagcgcggcggctacctgactgccgagacggtgacgatgtgggtggtctacgcgctcacgctcgtcggcaacgcggttatcgagggaggccaggtagggggcaacacatcggccaccgtggcctacggcgtgttcacctggttcacgccggcgggctacgtgttctccatctggtcgctcatctacgtggcgctcatcgcgtggctcgtgtcctacacgcgcgaggcgcccttgcgcgccaagcgcttcacccccgtgtccgtgctgttcatcggcagctgcgtgctgaacgtgctgtggctggcgctgtggcacttcgagctggtgggcatctcgttcatcgtcatcctggccgaatgggcggtgctcgcagccctgtatctgaacgtgcgccggtcggcgaagtcgggctggggctgggtgcccatctccatctacaccgcctgggtcacggtggccgcgctggcgaacatggccatcctcgtgacgcgcgctttggacggcggcatcgcgttcttcaacgggctttcggtgctggccctcacggcgggcgtgctggccctcggctacgtcatgcgcaagatgtacgacgacgtggcgttcccccttgtgttcctgtgggccctcatcggcgtgggcatccacgtggccgaggcgtcgtggctcgtgtcctccctcgtgttcattctcgtcatcgcgggcgcggtgctcacgttcgtgccgctgggcaagctgcgctccgccgtgcgggggtaggcgggcttccggcgcgagggcgttcgtccgaggcctcgcaggtgctccggcgcccttcttgacggat

SEQ ID NO: 80 - DNA, 67600 bp, Gordonibacter urolithinfaciens
  source 1..67600: mol_type = genomic DNA
cgagcgcctgctcgggcgacgagtagctcaccttgccgtcgagcgggctcttctcctcggcgagctgcggggcctgctgcacggcaacctgcaggcgcagcagcgtgcgcaggtagtcctcgtacatggacgacgtgaggttctggaaggcgttgtaggcctcgttcttgtactccacgagcgggtcgcgctggccgaacgcgcgcagcccgatgccggacttgaggtagtccatctcctggaggtgggccatccagcgcgtgtcgatgatgcggagcatgacctggctctccagcatcttcatgaccggctcgcccagctgctcggccttctcggcgtacacgccgtccaggtactccacgagcgcgtcggccagaaggcccggatcgtcctcgtggtcgacgccggccaccttgaagtcgtcgcggcccgtcatgttggcggcccacgtctccacaggcctcacgtcccagtcgtcggaaggcgccttgtcggggcagttctccgcaaccacggcctcggccgcgtcgcgcacgatctcggggatgcgctcggagaggtccttgccgtccaggatggcgttgcgctcgccgtagatggcggcgcgctgcaggttcatgacgtcgtcgtactccagcacgttcttacgggcggagaagtgcatgctctccacctggcgctgcgcgctctcgatggccttcgacaccatgccggcctggatgggcatgtcgtcgggcatgtcggtcttctccatcatacgcccgatggagtccatgcggttgccgccgaacaggcgcatgaggtcgtcctcgagcgacaggtagaactgcgtggtgcccgggtcgccctggcggccggcgcggccgcgcagctggttgtcgatacggcgcgactcgtggcgctcggtgccgatgacggtgaggccgccggcggctatgacctggtcgtgctcggcggcgcacacgcgcttcgcctcggcgagcgcggcggcgcgctgctcgtcggtgggcgcgggggccgcagcctcgtcgccctcggccggcaggtcgtcggggcttcggtcggggtcgagcccctgcgcgcgcagggcgtcctcggccatgacgtcggggttgccgccgagcaggatgtcggtgccgcggccggccatgttcgtggcgatggtaacggcgcccacgcggccggcctgcgcgatgatgtgcgcctcgcgctcgtggttcttcgcgttcaacgtctcatggcggatgccgcgcttgtcgagcaggcgcgagagcttctcggagctctcgatggacacggtgccgatgaggcagggctggcccttcgcgttgcgcgcggccacgtcgtcggcgacggcgttgaacttcgcctccaccatgcggtagatgaggtcgtcctcgtcctttcgcgcgacggggcggttcggcgggatggccacgacgggcagcttgtagatctcgcggaactcggcatcctcggtcatggcggtgccggtcatgccggagagcttctcgtagaggcggaagtaattctgcagcgtgatggtggcgagcgtctggttctcctcgcgcacgagcaccttttccttggcctccaccgcctggtgcaggccctccgaccagcggcggccctccatgatgcggccggtgaactcgtcgacgatcttcacctcgccgtccaccacgacgtagtccacgtcgcggtggaacaggaactgcgccttgagcgcctgctgcaggtggttggccagctggcccgacgggtcggcgtagatgtcgtcgatccccagcatggactcgatcttctccaggccgctctcggtggcgttgatggtcttcttcgcctcgtccatgtcgaagtccacctcggggacgagaccgggcatgacgcgcgcgaacttgttgtacgtctcggccgcctgcgtgccggcgcccgagatgatgagcggggtgcgggcctcgtcgatgaggatggagtccacctcgtcgacgatggcgaagtggtggccgcgctgcacgcgggcctccgcgcgcgtgaccatgttgtcgcgcaggtagtcgaagccgaactcggagttcgtgccgtacgtgacctcggcctggtaggcggggatcttcttgtcggggcgcatgccgttctggatgaggcccacgttcatgcccaggaagcggtagatctggcccatccactcgctgtcgcggcgggccaggtagtcgttcacggtgacgatgtgcacgttgttgccgttgagcgcgttcaggtagccggccagcgtggacacgagcgtcttgccctcgccggtcttcatctcggcgatctgcccgtcgttgagcgccatgccgccgatgagctgcacgtcgaagtggcgcaggccgagcgtgcgcactgatgcctcgcgcacggcagcgaacgcctcgggcagcaggctcttcaggtcctcgccgttgtcggcgcgctcgcggaaggcggcggtgagggcggcaagctcggcatccgatttcgcctgcatcccgccctcgagggcgttgaccttctgcacgagcgcctcgtagttcttcaactgcttgccctcgccgagcgtcagcagcctggataggaatcctgccatgtgatgcgccgtccttttcttggctttgaacagtacctgctactctagcataacgcgcctggcctcaaaggaaatccacagtggccgcaaggcgttgccagcaaccgatcgcctatgcggcggccgcacgggcgacgccccccgtgcgccctgccggccttgggcccggcaagccccgcgacgatcggcccctagccctcggctccctgcccggcgtcgggcgcggcgccttccgcctgcccgccgccgtttccgcccttgtccttccgcagggccttcggaagcgggatggcggcgcccagggcggcggccaggaacatgaccacgacgcccttgacggggaagcacaggaaaagcagcagcacagccatgaggggctggcgcatgacggcacccacgagggcggccgtgcaggcgcagaggcagaacaccgggtcggcgccggtgagggcggccatgccgtagccgatcgacacgcccgcgaagatgacggggaagaaatgcccgccgcgccagccgaagcggatgcacagcggcgtgatcatgaccttcgcgaagccggtggccagaagcgcgagcgcccccatggaggtccacacctcgcccagctgctcggcctgcacctcgccggcgaacatggtgaacggcagcaggatgccgagcacggccagcacgaggccggcgatgagcgccttcgccacaggacggtcgcccatcttccccgccgcgcgctcgaacaggccgtcgaacacgcagaagagccatcccgccgccgcgcccacgaacgcgagcggcaaaagccaggcgagctccgccgtgccgacgtggatgtcggtgaagcgcggcagcgacatgccgccgccgaacagcgcccccagccccatgaacgcggcgagcgcgcccgcgatggcgcagaagtacacgacgatcttcgagttcttcggcagcgtgatggtggccgcccccttgggaccgtccccgccctcgccgccgtccttcccgtcgccgtagagcggcgccgcgaacccgaacaggggggcggtgaagatggccgagagcgccgccatggtgcccacggacgtgagctgctggaagtcggcgccgaagcgcttcatgcggtcgcccacccaggtgcagatgcccgcgacggcgccggtgaggcccgcctcgggaccgatggagccgccgaagaacagcggcagcagcgcggctatggacatgacccccagcttgtcgtagtcgtagcgtccgtcgcgcttcaccttcgccatgacggcgtccaggtcctcggggtagggtccgaagcgcttggcgaagaggccgacgacgaggccgcctacgaggcaggcggccaaggggaagtagatgccgaagcggccccccacgttgtcccagacgaacgagatgcccaggttcatgacgaacaggagcgcccacacgaacgcgccggccaccgacccggtcaccacgaccgagaggacgaacagcgtgcggttcgcaagcttggcgagcttcatccgcgcccccctaccggccggcaaccaggtcacgggccgccggcaggccgcaggcgccctcggcttggcacacggcacgcacgatggcgccctgcatggcctcgcaggccagcacagataccgcgtcgggcagcgcctcaacctcgccggacgcgaacgcgaacacggtgtcgccgtcgttcagggtgtgcacgggcttgatggcgcgggcataggcgtcgtggacggtcgaggcggtcttggtcgcctgggccttcgtgagccgcgcgttcgtgagcacgacgccgatggtcgtgttggcgcagggcccgccggcggcgggagccgtcccgtcgccggccgccgccgcagccgccatcgcgccgaacgcggcgagcgggtccatgacgtgcccttcgtcatcgcggcagccggcgatccatgcgccgtcttcgtcgcgcacgttgccgagcgcgttcacggccacgacggccaccaccgccagctcgccgagcgcgagcccgcagatgcccaggcccgccttcatggcgcgcccgccgcccaggagcttgcccaccgtggcgccgcagccggcgcccacgttgccctcggccagcggctcttcgggcgtgcgggcgaacgccgcggcgcaggcctcggcgcccatggcggcgtccgggtgggcattctcccccaccagcaaatcgaagaggcaggcccccaccacgatgggcacgcgcgcgccctccacgggaaagccgatgccgcgcgccgcgagctcgtccatgacgccggcggaggcggccagcccgaaggcgctgccgccggcgagcaccacggcgtgcacggcctcgatcatgttctcggggcgcagcaggtcggtctcgcgggtggcggggccgccgccgcgcacgtccacgccgcacaccgcgccctcgggcgccacgaccaccgtgcatccggtggcggctcgggggtcctgggcgtgcccgcagcggaaggcgggcaggtcggcgagggaggcggttcggaacatggttctctccttgctcgggtcgggcgacagtaggcgggctgcagccattgtacaccgtccgcctcgcctggcggacggtcgggcaggcgttgttcgcatgccgaaaagccgtttgcgcaacgcggcgaacgaatgtccgggcttgctaattgctgacctcgccgctatgatgatcgaatccaaccgggccgatgcgctgcctccgcgagaggagcgtttccctatgaccgggttcctgaagcaatcgtcctgcaagggccatcgtcccaaccatctggcatcgcgccgccattacccgcgccccgacctcatcgctcgcctgctgcgcgagcgccatgtggcgcgcttcctggtggcgcccgagggcttcggcaagacggggctcgccatggagtacgccgacgtggtgttctcgttcgaccacgtgttctggatcaacgggaagagcccctgcttcctacgcgacctcgaccggggcattatctcgtcctcgctgacggcggccgatgccacatcgttcctcgcggtggtggaggacgtgccgcccctcgatgcggcccgagccgccgcgctctccggcgtgttcgacgagctgctggggcgcggatgcgaggtgctggccacgtgcgccccctcgtgcgacgcctacgggccgcttcagcacgaccgcctgaagctctccgccgccgacctgctgctggccgatgccgagttggacgccgcccgccctgccgacgaccgggccgcccgccccgctgccgccgtcccgccgacggagcgcgtgcccgggctggtgtgggggccggtcggaggagagggctccttcctggaggacgccttgcgcgaggagctgccggccgacctgctgctggccatggccaccatgctcgtgctgggcaggggctccctgtccgacgtggaggcgttcggcccgtgcggggaggatctggcggcgcttatggcgacaggctacccctacctgggcatcgaccggcgttgcgagcgcttcgagacgccctgcttccccgtggaggccgtggcgggggcggtcggcggcaagctggatgtcctggccgcgcgctcgcaccttgccgaccgcgatgcgctcgcggggcgctgggccgacgtgctgctgtcccgcgcgcagggagagcgcgcgtgcgacctcgtggcggccctgtgctcgcgcggtgcgcgcgcggcgtggctcgcggagcggtcgcgcacgctcatgcggcaggcatgcgtgctgccggcccatcggctgcacgcgtcgctcggcccgtcggtcccctctgggaacgcccagctcgagctgggggaggccgtgcggcttgccgtgctcggcgaccttgacgcagcccttgccgccgcgcggcgcatcgcttccgacttgggggcgcccgccggcatccgcgccctcgcggcgctcgtggtcgtgcgggagggaaagggctccgcgcgcaagcgggctcgcgaggagctcgcacggctcgccggccccggcgatacggccgacgtcgtggggacggcgggcaggggcggcgcggtgcggcccgaccccgctttctggcgcccgctcgcgcaggcgcagcttgccctgctcgacgaccccgcctggctcgtgcacggcgccgccgcggccgccgagggaaggctctccaccgcggacggggacgcgctcgccctcgcggcggcctgggcgctcgcggaggtggccgagggccgcgggggcgtgggcgcggcggatgccgagcagggcgcggcggccctaagccgcatcgaccggtacgtccgcaagcgcctcgccggcctggaagggcaaggcgacctgttcgccgccgcggccggcctcgccctggagcgcgtccgcgagcggggcatccttcccgcctcccccgcgctgcgcgccgccgaggccctcgcgctgcaccgcgccgagatggagctgttctcccagcgccgcgccttcgagcgctcagcccgcgagagcgccgagcgacgtgcggagcgcgcggccacgcgtcccgacgcgtacctcgacgggcgctacctgcccaaggagggccgcgcacccaccatggtgcccctgctcaccgtcaacctgttcggcgggctggacgtgcgcatcggcgacaccccggtcgatccgggccgcttccgccgccagaaggtgaagacgctgctgacgctgctcgtgctgaaccggggccgcgagttcccgcgcgaccgcctcgtgggcatcatgtggcccgagagcgagacggactcggcgcgcaagaacttctactcggtatggtcgcatctgcgccgtgcgctgtcggggccgtcgggcgcatgcccctacctcgtacgccagcagaacggctgccggttggacgagcgcctgatcgtcaccgacgtcgcgcggttcgacaccgtatgccgcatgctgctgttcggccagccgggagccgacggatgggcgcagctctacgcggagatcgacgaggcgttcgccgacgacctcatgccgagcgagcaggacaacgagttcgtcgtgcaagcgcgcaaagaccgccgcatgcagctcgtggacgcgctggtggcagccgccgaccgcctcgtcgcggcggacgacgcgcaggaggggctgtggttcgcccgcgcggcgctgcgccgcgaccgcacccgcgaggacgcgtacacggccctcatgcgcgcccagatcgcagccggccagcgcacggccgccctcgagacgtacttcgagtgccgccgcttcctgaccaccgagctgggcatcgacccgtcactggccaccatggagctctaccgcagcatcatcgagacggaggagctgctggactgatgcgcgcgcggcaccgcccttgtacaacaggatggttacaaggattgaaaggtgctttcatggtatagaaattatatcgataaggggttataatggaattcgaatatgacccgcagaaaagcgcgcggaatctcgcgaagcacggaataggcttcggcgaggcgcagaggttgtgggatgacgaacgctgcatcgagctggcctcaccgttcagctcggaagaccgctacttggtgatcggaatgatcggcgacaaacattggaccgcgatcgtgacgtaccggtcggctgcggtgcgcatcatctcggtccgccgctcaaggaagaaggaggctgcgtgctatgacgaagcgaatcgacgctgaagagctcgaccgtctgttcgacgaggggaaggaggacatcctccagtatttcgataccgagcatccccggatagctggaaccgagacccggcgcgtgaacgtggacttccccgcctgggtggtggaggcgctcgaccgcgaggcgcggcgcatcggcatcggccgccaggccgtcataaagacatggatcgccgagcgcctcgacgaggaagcatcccgccgcagcgcctaagaggctgcggggccttccttccaagagggggaaggccccgcccctcggcgaggctcggtccggggcttaaggtaccagccccgctactccctgcccaggagcttggcgatgcggtcggagtattcgagctcggtgagccccgcctcctcggccaggtcgatgaccggggcgtcgttccacagggcctccagacggtagtactcgcgggtctccggctggaacacgtgcaccacgatgtcgccgtagtccagaagcgaccacgtgccgtcctgcgtgccctcgcggtgcagcggcttgcagccgccctgcacgcgctcggcctcctcgatctcgtcgacgatggcctccacctggcggttgttcgccgccgtggcgatgacgaagtagtccgtcacgccgatgaggtcgcgcacctcctgcaccatgatgtcggtggccttcttctcgtcggccgcgcgcgccgcgatgagggcgcgctcccgcgaggtcttctcttccatcttcttcggttcgctcacgctgttcctttcctcccttttcgttcgtccgccgcgtcgtgcgagcgggcgaggtagtagttccatatctcgatgctctgcggatggatccgcttgcgccgctccaccaggctcaggaacacgtgcctgaacgttgccaggtacaactcctcgagcggcacccgacctacaagcgcgcggatatcgtcgagccccgcgtagtcgcgccccggctcgagggcatcggccacgtagaccaccatgtcgaggccggtcatccccaccgcgccggccgtgtgccgcgcgatggcctgcaccacatcgcgcggaaggcatgggaatgcgcgggcgagcgccgccgcggccgtggggccgtgcagcagccagggcatctcctcgaacacgtagggatccaccgccaggcccagctcctccacgcggacgcggatgccggcatcgtcgtaagccttgtcccagtcgtgcaaaagccccgccagccgcgccttgcgctcgtccacgccgtaggtgcgtgccaggcgcgcggccgtgcccgccacgccgagcgtgtgctcgaaccggcggcgccccaagcgctcgcgcaggtcgcgctcgcgcgcctcgaggaacgcgtccgacagcgcatcggcgcagcaggctgcctcgtcctccccgctcatcggcacaccccctccccggcctccggggcgtacaggccgtgcgcggcgatgtagtccaatacgcgctgcatcacgaggtagcggatcgagcgacctgcacgtacccgcgcgcgcaggtcgctcgacgacacggccagcgccgttacctcgaggtacgtcacgtcgaagcggccgtgctcctcgatctcgcgcttccgctcggccgtgagcgcgtagcccggccgcgtgacggcgatgaggcgcgccaagtcggcgatggcggcgctctcccgccactgcacgatgtgcgccacggcatcggcccccgtgatgaagaacagctccacgtttcccgggtagtggccgcgcagctcgcgcagcgtgtccaccgtgtacgtgtcgccgccgcgctcgatctccatcgcgctcacgcagaacgccgggttgctcgccacggcgaggcggcacatggccaggcggttggccgccggcgtgacggcgcggtccttcttgaacacggggttgccggccggcacgaacacgacggcgtccagcccgaaggcctcgcgcgcctgctcggccgtggccaaatgcccgatatggatggggtcgaacgtgccacccatgatgccgaggcgggccggagcgccgtcctcccccaggtcgtcgaaccgctcgcagacaactgccactacgcgcgcacctgcccgtcgccgcgcagcacgtacttgtacgacgtgagcgcctcgagcgcaaacggcccgcgggcgtggagcttctgcgtggagatgccgatctcggcacccaggccgaactggccgccgtcggtgaacgccgtggaggcgttcgcgtacacggcggccgcatcgacacgcgcgaggaacgcctcgatggccgcggcgcccgccgggtcggccgggtcggccacgatggcctcggaatgcttcgtgccgtagcggttcacatggtccacggcctcgtccacgccggaaacgcacctcacggccagctcgggcgccaggtactcggtctcccagtcgtcctcggtcgccggctcggcctcgatgccgtgcgccgccgccacggcgcgggcgcgctcgtcggcgtgcaggaccacgccctgctcgcgcaggtcggccagcacggcgggcaggagcgcctcggccgccgcctcgtccacgagcagcgtctcggccgcgttgcacaccccgtagcggcggcacttcgcgttcaccacgatggcgcgggcccgctcgaggtcggcgctcccgtgcaggtacacgtggcagttgcccgtgcccgtttcgatgaccggcaccttcgacgtctccacgcagtggcggatgagccccgcgccgccgcgcgggatgagcacgtccaccgtcccatgcagccccatgagctcgtcggccgccgcgcggtcggtggaggcaacgaggccgatgcacccctgcggcatgccggctccctcggcggcgtcggcgagcacgcgggccaccgcctcgttcgagcgggccgccatgctcccgccgcgcagcaccgccgcattgccggacttcaggcagatgcccgccgcgtcggccgtcacgttggggcgcgcctcgtacaccacggccaccacgccgagcggcacgctcacgcgctcgagcccgatgccgctctcgagcgtgcgcgcgtcctgcacccggccgagcgggtcgggcagcacggccaggtcctcgagcgcggccgccatgccctcgatgcgtccctcgtcgagcataaggcggtccaccaggctctccttcgtgcccgccgcgcgcgcggccgccacatcctccgcgttcgccgcgacgatctccgccgcatgcgcgcgcaaggccgccgccatggccgccagcgccgcgttgcgctccccggcgctcgtctgcgccagcgccccgctcgcggccctcgccgactcggcgatgcgccgcacctcctcgcgcatggtttcgtcacccatgcgatctcctttcccttgcgctcccgcgcttcacgcgcagcgcgaaaaacaccttgccggtccgccaacgtcagcgagggacgttccggtacccgagattcacgggaaggcggaggcgaagcgtacttcagtacgcgagccttcgcattcacgccaagatcgggtgccggaacgttccgcagcgtcggcacgttccgccggccatcaggctggcggaaccatcactcgaacacgatcagctcgtcgcggtggacgagcggcttgtcggccaggcttgagagcagccggttgccctgcagctcggcgcgcgtgcggccgatggcgagcgcggcctcgtcgcacgagaacgccgccttgccgcgggcgaacaggtgccccgaggcgtccttgatgtccacgacatcgcccgccccgaaacgtccttccaccgcgctcacgcccaccgacagaagcgagctcccccggccgacgagcgccgccttcgcgccgtcatcgaccacgagcgcgccacgtgccgcgtcgccgagggcgatccagagcttcttcggcgtgatctcgtggggcttcttcgcggcgacgaagcgggtgcccacgtcctcgccgcgcgcggcggccacgatagcacctgcgcggcgcccattgcacacgaccatggggatgcccgccaccatgagcacgcgcgcggccttgatcttcgttatcatgccgcccgagcccacggtggtgcccgccccgcccgccacggccatgatctccgggccgatggcctccacgcgaccgatcagcttcgcctcgggatcgaagtgcgggttcgcgtcgaaaagcccttcgatgtccgagaggatgaccatgaggtcggcctccaccaggcacgcgacgagcgccgcgagcgtgtcgttgtcgccgaagcggatctgctccaccgacacggtgtcgttctcgttcacaatgggcacgacgcccaaatcgagcagccggtcgaacgtgtcgcgcgcatgcaggtacgcctggcgatcggccgtgtcgcggcgcgtgagcagcaccgtggaggtcacgatgccgtgggcggcgaacgcctcggcgtaggccgtcgagagcgcgctctgccccaccgacgcggccgcctgcaggctcggcatgtcatgcggccgcttctctatgccgaggcgctcgaggccgcaggcgatggccgccgacgtgaccacgaccggatgccatcccgcctccttggcctcggctatctgcgcggccaccgcggccaggtagccgtagtcgatcttgctctccgacgtggtgagcgtcgacgagcctatcttgatgaccaggcgctttccgcgcccgccctcttcagccctcatcacaggtcgagctccttgaacatatcctccgccgtgcgcgccgactcgaagccgaacgcgcgcccgacgatgcgaatctcgtcgccgtccaccgcgccggcgcgctcgagcgccgtctccacgccgaggcgcttcaagcggtgctgcaggaaggcgatggcctcctcgttctcccagtcggtctgcaccaccatgcgctcaacctgcgggcctgtgacgcggaacacgccgccgcccaggttcaacacctcgaagcgcttgtcgcgcatctcgcgcttgtgctcccacacgtggtcgtactgcacgtcggcgcccaggtcggcccgcgcggcctcgcgcagctcgtgcaccttcgtggcgatggcggccttgaggccgtcgaccccctcgccagtgagcgcgctgatgcggtagagcttcgggtcgacggggctcggggcgaactcgtcgccgcccgcggccgcgatggagtcctcgcgcacgcgcgccgccagccgctcggccgcctcctcggtgccgggcacgtctatcttgttcgccaccacgatgcgcgggcgcgctgccagctcgtcggcgtagagcgcgagctcgcggttgatgatgtcgtagtcttccagcgggtcgcgtccctcgtagtcgcccgtcaggtccaccacatgcacgatgagcgccgtgcgctctatgtggcgcaggaattcatgtcccaggccgcgcccctcgtgcgcgccctcgatgaggccggggatgtcggccacgacgaagctgtagtcgcccgagcgagccacgcccaggttcggcacgagcgtggtgaacgggtagtcggcgatcttcgggcgcgccgcgctcatcttcgcgatgagcgacgacttgcccgccgacggcatgcccacgagggccgcgtcggccatgagcttcatctccagttcgatccagccctcctgcgaaggctcgcccagctcggcgaacgcgggcgcgcgccgagtcggcgtcacgaagtggatgttgccgcggccgcccatgccgccctcggccacggtgacgcgctcgccgtcgtgcgtgaggtcggcgatgagctcgcccgtctccttggattcctcgaagtactcgcgcaccaccgtgcccacgggaaccttgagcacgaggtcctcgcccgtggcgccgtgcatgcggctgcccttgccgtgcgtgccgcggtcggccttgaagtggtgcttgaagcggtactcgatgagcgaggacaggctggcgtcggcctccaccaccacgttgccgccatggccgccgtcgccgccgtcgggcccgcccttcggcacatgggcctcgcgtcggaacgacatgcagcccgcgccgccgtcgccgcccttcacgtgtatgcgaactttgtctatgaacacctgggtacctctatctccgttccggctccgcatcaaggggaaccgggggacggattccctgatctcgcaactcggattgtatatgaaaagtgccccctgacgagcagggggcacgcgaaaacagataacgttacgcagtcgtggagcaggtggctttgcccctaagcttcgggacggacgtgcaccttgtgcttcgcgcccttcgtgaactcgatcttgccgtcgcacagggcgaacagcgtgtcgtccttgccgcggccgacgttctcgcccggatggatgtgcgtgccgcgctggcgaacgatgacgttgcccgtgtgcacctcctggccgccgaacaacttcacgccgagacgctgcgcgtgggaatcgcggccgttacggctggaaccgagacccttcttgtgtgccatggtattccctcccttgctttattcggcgtcgacggacgcgggctcttcggccttctcggccttcttcggggcggccttcttggcagccttcttctcggccttggccgagccgacggactcgatctcgacgcgcgtcagctgctggcgatgaccgcgcagcttcttgtagttcttgcgcttcttgaacttgaacacgagctgcttctcgcccttgaactgctcgagcacgatggccgtgaccttcgtggcagcggccttggccggatcggcctcgaccttctcgccgtcgacgatgcagatggcctcgagttcgaccttcgcgccgacctcggcatcgagcttctcgatgttcagcttgtctccgggggcaaccttatactgcttgccgcccgtctttacgattgcgtacatgagtgtctccttgtatgaaataaaacgcaaggcgatagcttaccagcgggatcgtagcaagtcaaggtgatcttatgcacaatctccgcgtatcatcgcactctttccgatgccgtgcctccacaaagcacaacattcatatgatagcagaaaatcatagccacacgcggtggcgtggcatgttttttcagaatctcacaggtccgacaaagtcagcgagaagcgccggggtgtgacagggggacggaacctcagtgcgactccgcccagcttgccccccaggacacgtcggccacgagagggacgcggagctccgcgacgccctccatcacttccctcaccatagcggacagcgcctcgatctcggcctcgagcacgctgaagtccagctcgtcgtgcacctgcaagagcagccgggccttgaagccctcggccatgaggcggcgctgcacctcggccatggccagcttgatgatgtcggcggcgctgccctgcatggggtggttcatggccgtgcgctcgccgaagccgcgcgtggcggcgttcgacgccttgagctcggggatatggcgcttgcggccgaacatcgtctccgcatagcccttcgccttcgcctcctcgatcgtggcgtccaggtaggagcgcacgccgggatacgccgcgaagtagcgctcgatcatctccttcgcctcgccgaacgggatgcccaggctctgcgacaggccgaacgcctgctggccgtacacgatgccgaagttcacggccttcgcgcggctgcgcagctccggcgtcacctcctccaccggcacgtcgaacacgcgcgcagccgtggcggcgtggaagtccgcgcccgagcagaatgcggccacgagatgctcgtcgcccgagaggtgcgcgagcaggcgcagctcgatctgcgagtagtcggccgacaggaaccgctcgccgggcgcgagcggcacgaagctctcgcgtatctggcggccgaactcggtgcgcacggggatgttctgcaggttagggtcggacgaggacagacggcccgtggtggtaaccgtctcgttgaagcaggtgtgcacgcgcccgtcgccggcgcgcatgcggggcagcgcgtcgatgtaggtggacttgatcttcgcgagctcccggtagcgcagcacgagggcgggcagctcgtgcacggcgcacagctccttgagcaccgcggcgtcggtggagtagccgcgctggttcttcttgaggggcgtgagccccagcacctcgaacaggatgcgcgagagctgcttggggctgtcgaggttgaacgtctcccccgccatgtcgaagatgcgcgccgagagctcgtcgagctcggcctgcgtgctggcgccgagctccgccaggcgttcgcagtcgaccaccgcgcccgtgcgctccatgatggcgagcacgcccacgagcggcaggtcgatgtcgaagtaggcgcgggtgctgccatcgcgctcgagcgcctcggtgagcgggctcacgagcgcgcgagccgcggcggcctgcgcgcaagccaggtcggcttcggccttcgtctcgggcagcacgccgccgcagtaggcgtcgagcagcgcgtcgtaggagtactccgtcaccgacgagttcagcacgtagccggccagccccaggtcaaatgcgcgcatgcccatgaggtcgtcgtcggatgcgagcgcaggctcggacgtgtcggccgggtagacgcggtgcacggcatgcttcacgtcgagcgccgcgaacgagcccgccgccacgatgcgcgcgaacgccgcggggccgccctcgtcctcgtagagcgccgtgccctccgtggtggagacagcgcacgtcaggtccacgttgaagagcgacgcctgctcgggctccacgaacgccacgcccaccgtctcgccgcgcgcgatggccgcgtccacgagggcgtcggcctgcgcaccggtcacgacgggctcccacgacagcggggccgccttcttctccagctcgcgtcccaccagcttgagcacgcggctcaggtgggcgttgaactgcaccttcttgaacgcctccgtcacgcgctccgggtcgaacgacgggaagcagcactcctcgagatcgagcgggaagtccaggtcgcacacgatggtggccacctcgcgggagaggaacgccatgtccttgttgtcgaccatcctctccttctgcttgcccttgaggtcgtccacgtgctcgtagatgccctccaggttcccgtaggcttgcagaagcttcgcggccgtcttgtcgccgatgccgggcacgccggggatgttgtcggacgagtcgcccttgaggcccaggaagtcgatgaactggtcggggcgcacgccgtagcgctcctccacctcggccgggccgtagatggccacgtcggtgattcccttcttcgtggtgacgatgcgcgtcttgtcgctggccagctggtaggcgtccttgtcgcccgtcacgagcagtgtctcgtatcccagctcctcgtcgcgtgcggccaccgtgcccaggatgtcgtcgccctcccagcccttgatgcgcacgacgggcacgtccatggcctcgagcagctcctcgatgatggggaactgcaccttcaggtcgtcgtccatgggcggacgctgcgccttgtactgctcgagcgctttcatgcggaaggcggggcggcccgcgtcgaacgcgcagatgatggcgtcggggctggccatgtcgatgaacttgagcagcatggcaagaaagccgaacacggcgttcgtgggcgtgccgtcgggggcgttcatcgtctgcggcacggcatggtaggcgcggtgcatgagcgagttgccgtcgatgacggcgatcttcttcggcatgggcttcctccgtcgcttgagtttcagatggattagtatagcgcatgcgggctgtccgctccggggatggggccgtgcccaccaagcgagttccgcacgagccaaaacgccctgtgggcgttttgcgcgagcaggactgcccgagcgactgggcacggccccatccccggagctgcttgcatctccttgaaagcatcatatgaagctgtatgcgaaagggaggttgccgctgacagaaatcaaccagggaggggcaactcgctcggtaccttggtgagaggctcaacctgcgaggatcgagtagctgcggggttcgttgccctacgacacgccgcctcaaccagcggcccctatgcgctccatagatagcccacgccgcgaaccgtttccaggtgctgcgcgaggtcggggccgagttttgcgcggacgcggcggacgtggacgtccacagtgcggctgccgccgtagtagtcgaagccccacacgcggcgcagcagggcgtcgcgggagtacgtgcggccgggatgggtcacgaggaaggcgagcagggcgtattccaggtacgtgaggtccaggggctcgccggccacgttcacctggtaggtggccaggttgatggtcagggagtccacggcgacgaagtccgacgcggagctctcgttgccgggccacagcagctggcggatgcgcgccgcgcactcgtccggggacgcgccgtgcaccacgaagtcgctcttcacctgcacgggcaggcggaactcgcccagctgatcctcgcccacgatcacgaggagcgccgcggagccgtcctccaggagcagcgactcggcctgggctaccctccccagcgcctcgccgcgcgcctcgtagactaccaggtcgtagccgggatgctgcaccagcaggttcttcagctgcgccgacgatccggcagccacctccacgtcgaggcccgagagcacctgctggaacttgtgggcgttgtccaggctgtccgctacgaatatgactgatttcctcatactagagtctccgaccgtccgtcatggcctcggctacagcaccgccaagtagcggtcgcgctcccacgcgctcacgttgccctggtactcgttccactcggcgcgcttggcggccacgaggtaggagtggatgtggtcgcccagcgtctcgcgcatgagcgcggacccggcgaacagctccgcggcctcgcccaagctctcgggaagcgtctggatgccctggcggcgcagatcctggcgcgagagcgcgaacaggtcctggtcctcggtggggggctgcagctccagcccctcctcgatgcccgcgagccccgccgccagcatggcggcgaaggccaggtaggggttcgcggcggggtcggggctgcgcagctcgatgcggcaggcgtcctcgcggtcgggccggtagccgggtatgcgcacgagcgtggagcggttgcggctcgcccacgacaggtacgtaggggcctcgcccccgcagacgaggcgcttgtaagagttcacgaactggttcgtgaccaggcagaactcgggcgcgtacttcaagatgcccgcgatgtagcgcttcgccacgtccgacaagcggtagccctgggggtcgcgcgcgtcgaagaacgcgttgttgccgtcgaggtcgaacaggctctggtgcacgtgcatgccgctgcccggctcgcccgccatgggcttgggcatgaacgaggcgtacacgccgtgcttcagcgctatctccttcaccaccagcttgtacgtcatcaccgcgtcggccatggacagcgcatcggcgaagcgcaggtctatctcgtgctgcgagggcccgttctcgtggtggctgtactccacggggatgcccatcttctccagcgtgagcaccgtgtcgcgacgcaggtccgaggcgtagtcgaggctcgtgaggtcgaagtagccgccgcggtcgagcacctcggtgccctcgggccccttgaagtagtagaactccagctccgggcccacgttgaacacatagcccatctcccgggccttccccaccgtacgcgcgagcacgtggcgcgggtcgccctcgaacggcaggccgtcgggcgtgcgcacgtcgcagaacatgcgggcgaccgcgttggactcggggcgccagggcagcacctggaacgtggaggcgtcggggtacgcgagcatgtcggactcctgcgtgcggcagaatccctcgatgcagctgccgtcgaagcccatgccgtcggcgagcgcgtcctcgagctcgcccggcacgacggcgaacgacttcatggcgcccagcacgtcggtgaaccagaagcgcacgaagtgaacgtcgcggctcttgatggtcttgaggacgaagtcctggtcggggttcgcggtcatgggcgcatcctttctctcaagctaccattataacccgcgatgtttcggtctcgttacgcaacgccccggccatgcggcgaggtggcgggaaggcccttcgcctccttgcctgcctttcgcgaaccggtcggtaacgcgcgcgtgacggatgggaggcgcgccccattcgccacgccggaaggttatactttagaatccgcccgcggccgagcgccctggacggacgaggcacgcgaaacgagaggcaaggcaaccatgatggcagaatacgcggaagcgttgaaaagaaacggcatcgactacgacggggcgatggagcgcttcggcggcaacgcggagctttacgagcgccttgccctgaagttcctcgacgacacgcacttcgccgcgctcgagcaggcattggctggcggcgacgtggacacagcggtccgcgaggcccatacgctcaagggcgttgcaggaaatctttcgttcgccgcgttgtacgaggcggcgagcaaggtgaacgcagccttgcgcgagggcgacctcgcaggggcgacggcgctcatggatcccgtccgcagcgcgcacgcggccgtcgtctccgctttgagctcgctgcgcgacgcacgctgacctgcgattccacgaaaggtggcaccgatgaagttctccaacatcctcgtaccgttcgacaagtccgcgcacgccgtccacgcgctcgagatcgccaagggccttgccgaggaggacccggccatccagctgcacgtcgtcggcatcatcttcctctcggagatgccgccttccctcggcctggaggcgaacccctaccagagcgtcccgccgctcacggtcgaccccgacctgtacaagcagctcgtcgaggcggcgctcgcccgcgagaaggaggacatgggcgcggcgatcggcaccctgctcgacgggctgccgaaccccgtgcaggtgcttgccgtgaacgccccgtccgtcgtggacggcatcaacgactacgcccacgaccacggctgcgacctcatcgtcatgggctcccgcggcctgggcgtgctgcgcggcatgctgggcagcgtgagctacggcgtcctgcgctcggcggacgtgccggtgctgatagcgaaggaagcggagaaggagtagcgcgggctgtccgggccttctgttcttgtggagcagccggctgccttacgggttctcggccggcctttcgccctcccttggtataatggcccggttatggataccttgacccagcagaagaaaccggcggagagcgccgcgcgcgcacccaagcgcatcgccgtcgtgacgatgggcgtgaagctgggcgacgagacgcgcggctacacgcgcttccgcttcctctcggagctgcttgcgcgcgagggcttcgccgtcgacctcgtcacgtccacgttccagcattgggagaaggcgcagcgcgattgctcgaagccctgctaccagggccttccctaccgcatcgtgttcatcgaggagccgggctacacgaagaacctcgacctcgggcgcatccgcagccaccgcgttgccgccaagaacctgcgcgagcacttcgcaaagaacgccggcgcctacgatcttgtgtacgcggagatcccgcccaacgacgtcgcgcgcgtctgcgccgaggcggccgaggcgcagggcatccccttcgtggccgacatcaacgacctgtggcccgaggccatgcgcatggtggtggacatccccgtggtgagcgatgtggcgttctacccgttcgcgcgcgacgcgaagcgcgtctaccagctgctctccggcgccgtgggcacctccgacgagtacgctgcccgcccggccaaggaccggcagcgcccctacccccacgcgaccgtctacgtgggcaacgacctggccgctttcgacgcgggcgcgagccgcttcgccgacgcgatagagaagcccgccgacgaggtctgggtcacgtacgcggggacgctcggcgcgagctacgacgtggccacgctcgtgagggccgccgcactgctcgagcaggaacggctcgcgcgcacgggcgcgccggccggcccgacggggcaggcgatcccgcccgtgcgcgtgaaggtgctcggcgacgggcccgaccgcgagaagctccaggcgctggccgccgagctggacgcccccgccgacttcctcggctaccaggactacgagcacatggcagcctacctgtgcgcgtccgacatcgtggtgaactcgctggtgaagtccgccgcgcagagcatcgtcacgaagatcggcgactacctggccagcggcaagcccatggtcaacacgggctcgagccccgagttccgctcgaaggtctccgccgacggcttcggcgtgaacgtggaggcggaggatccgcgcgcgctcgccgacgagatagcgaagctcgccgggcacgcgtcgctgcgcaagatcatgggggcgaaaggacgcgccgtggccgagcgcgagttcgaccagccgcgctcgtaccgcgcgatcgtggatttgctgcgcacactgctgtgattttggttgagcgcctcgccaaaacggcggcggcgcgcgagaatatgagtttcggcgcgccgcaggcaagggcgcgcttgccgtgccatgaagcaaggagcgatatcttgaccgagcagagacgcgtttcgttctccccgcctgacatcacgcaggccgagatcgacgaggttgtggacacgctgacaagcggctggataaccaccggacccaagacgaaggagttcgagcgcgagctggcggccttcacgggcgccgatcgcgtggcctcgttctcctcggccacggccgccctcgagtgcgcgctgcgcgccctgggcgtaggaccgggcgacgaggtcatcacgagtgcctacacctacacggcctcgtgctcggtcatctgccacgtgggtgcgacgccggttttgtgcgacgtggccccggactcctacgagatggactacgacacgctggcgtcgctcgtgaccgagcgcacgcgagcggtcatccccgtggacattgccggccgcatggtcgactacggccggctcttcaccgccctcgagagcggtggcagccgctggacgcccgccaccgacctgcagcgggcgatcgggcgcgtggcggtgctggccgacggggcgcactcgctcggcgccgtgcaggacgggcgcccctcgggctccgtcgccgacttcaccgcgttctcgttccatgccgtgaagaacctcaccaccgccgagggcggcgcgctggcatggcgcgcgggcgccttcgactccgacgagctttacaaccagttcatgctcatgtcgcttcacggccagacgaaggacgcgctgtcgaagacgcgcgccggcgcctgggagtacgacgtcgcctatcccggctggaaatgcaacatgaccgacatccaagcggccttggggctggcgcagatgcgccgctaccccaccctgctcgcgcgccggcgcgagctcgtggggcgctacgagaacggtttggccgacctgggcgtcgacgtgctgcagcattacggcgaggacttcgcctcgagcgggcacctgatgctcgtgcgcctgcctggcaaaagcgcagcgttccggagcgcgctcatcgagcggcttgccgacgccggcgtatcggcgaacgtacactacaagccgctgcccatgctcaccgcctaccgcgacctcggcttcgacatcgacgacttcccgaacgcccgcgcgcagttcgaaaacgaggtcacgctgcctcttcacacgctgctctcggatgacgacgtggactacgtcgtgggggccttccaccgcgcctgggacgcgcttgaggcggagggtgtccgctgatgtacgcgaagttcggaaagcgcgtgtgcgacctggtgatcggcgtggtggcgctgccgttcgtgctgctgatcatagcggtgctggcaccgttcatccacttcgaggacaagggcccggtcttctacaacgccccgcgcgtggggcttggcggccgcgacttcaagatgtacaagctgcgctccatgcgcgtgaacgcccccgacctggtcatggaggacggctccacctacaacggcgccgacgacccccgcatgacccgcgtgggcgccttcatgcgcaagacgagcctggatgagatgccccagttcctgaacgtgctgaagggcgacatgagcgtggtgggcccccgccccgacctacgccgcgagaccgagctctacgagggcgacgaagggctgaagctcaccgtgaagcccggcatcaccggctacgccgccgtctacggccgcaactcgctcccctggcacgaccggctgaagatggacgtggaatacgtgcgcaccatgagcttcccgctcgacgtgaagattttcttcaagacattctccacggtgttcaagcaggagggcgtgttcgtggaggatggagaatgataggcttctcgccttccgccataaactagcagcggagcgaggttcatcgcccgaaagaatacacgcaaatgccagcaagaataagtccgagcgccacgagcttttttctagtcatcttctccttgaatatggtgactccgaaaacggtaacgtaaacgtagcttgttgcctcgagtatgggtcccatagacaaaggaatacctcggtacgccagtatcgagaggaacgtcgtgcctatgaagagcacgtaggcgaatacgaccaaagggttcaggtactctttaattgggctgtcgtattcttttaaagcagcctttttcagcataacttgcgatatcgagctgatgaaaacacctagaagcagaacgcaagaatacagcaggaccgtgctatccatcgacaagctcgcctttccctccagcgtcctcgccgtcggctttagcgaacaaggccactccgcaaatgacaagggcggctcccgctatcttgctaaccgtaacggtctctccaaaaaacaccacgccccagatgatgccccagacaaccgcaaccgcccgattggcgaacgctgtggtcaaagggagcctcttgatgatttgttgccacccaatggcatacaagccgagcaaacccaagatggccgcatagcatgccacgaactgccagctgaaaacattttgctgcgaagcgagcttgctgaagatgccgctcaccgagtacaccatgagcaggacgtgcagcacgaggagcgtcttgagtttcgaatgtttcacaagcatcacatcgcgcgaggcaggtaaggccgcaatcgctcgatcgtcgcagctctcatgatgtagtagccgaaccgggtcgaactgtcacgcactttacatgacggctcctcgattgggctgacatactcgatcagctcaggggctttaacctgaagacgatggagcacatcgatatcctcctgaccgacaacgaaacgaaccaaggcgcatccggaaggatcttttggctccaggtcgggcttgttgcccaaagcgatatcgacgacggcgccggtgtaatcgatacccgtcgacaagcggacaagatcgcttccgatgcagtcgccacccatgcggctaccgatctcgatgagccacacgtcgccatcggcgtccaccatgacctcggcgtgcgaggccccacaacgcacaccgagatgatcgagcgcacgcttcacaacttgaacgacacgaacgagaagcgcctcgtcgatggaagcgggctccaaatggccagtctcgataaaatggggggcgcccgttgtaaatttcttggtcaacgccaagaagctatgctcgccctcccatgacacgaactcgacactgaactcctcccctgcaacgaactcctcgacaacagcgcgtttcgagaatccctcggaaaacgccgcctctaaagcggcttcgagaccttccgcagactcaagcttggtaatgccccggcttcccgagcgatcaacaggcttgacaataaggggatacgcaagctcggacagtccgtcgcgcgagtcaccctcaaccaacacgctcttcggcgaagggtctccgcaggaagcgaacgttttccgcatgaggtgcttgtcggtcgatcgcgcgacgacagcggtcgggttgcccgtaagacctagagcctcagcgacataacccaccgtgatattcgccaaatctgagccaatactgcaaatgccatcgatgccaatctgtcgacactgttccaaaatggcatctctttccgtaatgctcactggatagaagtggtccgccgtacgttcaccgacatcgcctgcccgccatgcgaatacgtgagtctcgcagcccatttccttcgccttctcgatcaaaggattctgaaaatgggacgctcctatgatggcaagctgcttgcccatggtatccacacctaacccttcgctttgccggattcctcgagcagctcccagcgcccgctctccaattcagctttgtaatccctcatcatctcgacatagttcgtgaagcggggctcgaagccgaaatcgcgcttcgccttcgacatgtcgtagagaaacgagggtgtgttgttgggtttgtcgggccggtatactattcgcgaccccttgcctttgccgaacacctctatcacggctttagcttgatcctcaagatcgagactggttccactcgtcatgttgtacaaccctcgggcagcatcgctttcgagtgccaaccgaaaagcccgggccacgtctttcacgtaaacgatatcgcgcgttatgtggggatcgccccagagctcgatgtcgagccccgcctccgcattgtcgatgaacgtggcgatgcccgatttgtacggcttaccgttgacaaggatagtcccatggggcccgacgccgtacacgggcggcaaacggaacaccgacccctgcagaccgtgctgctggttgtagtattcgatcacgtcgttggcagcattcttgctgatgacgtacacagaatggtcgccagtgaacttgaaatcacgtggctcgtcttcggtgatagcatagcccttgccccaagcgccggatacgtcagaataactgcacgtcgatatgatcttcttgatgccatttttacgacagtattcaagaacattgatcgtgccgataacattgacctcaaaataatcggcagcgttctcctcgtcctccaagtcagccgtcgcattggctggcagcaatcccgccggcagcagaactccctcgacaccttcggtcggaagcaggtcgaaatcttcaggcttggtcatatccaagcgaacgaaccgagctcccatatcttccagcttcgcgcccagtcgctcgttccgtcccgtcgcaacgacatcttttcctgccttaatcaactcgtcgacggtgtacatgccgatgaagcccgttgctccgattaccacgatcatggtcgctcctttccattcaatatttccgctacgacgtacaggggccgattcttcacttcggtgaagatattgcctatgtaaatgccgactacgccaatagcggagagcgtgagtccgcccataaggtatatggaggcgatagtgctcgtccagccgacaggagccgatccatctataaaatacctgattacattgtagagcagataggcgaatgaaagcagggctatggcgaagccaacgttaaccgcaaaccgaaggggcttgttcgattgagcggtaatcaactcgaaagccatacgcattttctttgagaaattataggaagacttaccttcgaagcgctcatccccttcaatctcaatagcggcctgcctgaaacctagccacttgatgaacatggtgtatccgcggttgtgctcccgcatacgaagatagttgtcgatgacgatacggcgcgatacgctgaaattgcacaatgagctatcgtatgcgccgtcggtgaaatactcgtacgccttgtagaacgccttggataacaacttcgtcagtcctgtgtctttacgttccacgcggcgcgcaaagaccacatcgtatccttcttgagctttttcaaaaagctgaggtatcgcctccggtctgtcctgcaaatcgcagtccatcacaacgacccagtcgcccttgcacagatcgagtccagccgtgatagctctgatttgaccgaagttgcgagaaagccttacgcctaccacatgctcatcttcggcgcacagcccctcgatctcctcccatgagttctgcgggcaacgatcgtcgaccaagatgatctcgtaacgagcgcccatgcctacgaatgtgacggcaagacgccggcagagctcaggcaaagcggctcgacatccgtataccggcactacaacagaaatgagcacgatctcccctattcctttcttttgctagtcaaagaagaagcgaagaatgctcgaaccgcctctatcacccggtcctgatcttcttccgccagcccgtaatacatcggcaatctgacaattcgttcgctctcggccgtcgtatagacatcgtctcccgcaaaacgtccgaactttcgcccagccggtgccgaatgcagcgggatgtagtggaacgtagactggacatccctatctctcagataggcgataagcgcagtacgttcgctcaatcccctacatttcatgtaaaacatatgggcattgtgaacacattccttaggtacgacgggtagagaaattatttcttggtcggccaagtcgacaaacgcatgataataacgattccatattgcgagcctattctcattgatatcatcggcgcgttccagctgagcccataggtatgccgcatttaaatcgctcggcagataactgctgccgtagccaacccaagtatacttgtctacctgcccacggaaaaaacgggaacggttggtgcctttttcgcgcagcacctctgcgggctcattgtgcttctcgtcagcaatcagcagagctccgccttcgcccatcgagtagtttttcgtctcgtggaaagagtaacatccgaaatcaccaatgctgccgagaggtcttcctttgtataaactcatgataccctgcgcagcatcttcgacaatccgaaggttatactcagatgccaaatccatgatcgcatccatttcgcaagaaacgccggcgtaatgcaccacgacgattgcctttgtcttgtcggagacagccgcctcgatcatgcgttcatcaatattcatcgtgtcgggacgtatgtcaacgaatacgaggcgtgcgccagccaaaacgaacgctgtcgccgtagacgagaacgtgtagctgggaagaataacctcgtctcccggctcgatatcgcacaatagagcagccatttcaagcgcagccgtcccgctggtggtcaaaagggccttttgggctccggtgcagtcttccagccacgcgttgcatcgcttcgtaaaaactccgtcaccgcatatcttcttgttcctgatcgcctgctcgagatagacaaactcagtccccacgaacgggggctcgttgaagttgatcactgttgcgctcccttatcggtcgcggataagtccatatgccttttggtatgacttgaaaacagccttctccgagcaagcatagcgacagcacaaaccactatacccaatgcagtgagtacgacacctgccttcaaaccaggcgtttcatagtgcaaaacaacctcatggactccttcgccaagttcgatacccatgaaagctacgttagcttgtaacaattcagcgggccgtccatcaacctgtgcggtccacccttttgagaaggggaccataaaatataccagccgtggatcgttctcaatcgataccctgcacgagagcgtcgagccgtcgaaccgcacatcggccaccttgtctgcgccagcgtctttaagctgctggatctgggattcgtagcaatcaactggctgggcaagtacttgaagatcgtcgaatgagtaaacaccgggatcttggaaaataagctcgatccgctggcgcggctcattggaatagcccatgttgacgagccactcgtctttacctccgtataaatggctcgcgttcgtaggattccagattgttttttcgacgccagccaaactcaacctcacttttgcatccaccgtacccacgccatagactatatcttggaaggcgagctgctgcttgcgatataggggagtctcagcacgctcgctccctgtcaatcgttcggacggaagcaagtcgcgatacgaaaggcccgctatagcgacatacgcatcaacgtcaggtggcacctgcacatcaagcactatacgcgtatccgcacggtaaacggtgaatctttccccatcataagagaagccggtttcatcttctttccccccacccacgacaattggagttccgtcaaggctctccagtttgaaacccaaccgttcttcagtgaaaaccaagttcgcatcttcgagcggcgaagaagaagattccaccaccgccccctggagcaaagcttgctgttttcgggacggatccaattcgtcatagaccgtccgatcgataactttatcgtacgtaaataccagaggcagataggagtccgtctgggaaactcgaaatatcgatccctcggcttccccttcaaataccgtagtgtcgaacaacggaggaataagatcatcagattcatcgggagtcacaaagtattttacgccggcgagagcctcaagcggcgtacgcgaatcaagtccggcgtacataaagttaatggaacttgctgctagacccaaacctgtatggtattcatcgacaagatcgttgtaatagctgtcgtaaaacaggggcgatttcagtcgctgaaccatgttgctgttgaggtactgcacgacttcggcagagtcataccgccagaaagaatcgtcccctgtacgagaaacaagtgtcgtaggattattctcgacaagaacatcgtgagaacgaccaagtccaacctgacctgcaacccgattgccgccggaagcgacaaactgcgacccatagccgttgtagaagaaacagacgcaagccagcagcgacagaagcactgccgcctttttgccagtcagggtgcagaaagttcccgcaagagcaacgagcaatacgagcaacatcgcaacgccgaacaaagcctctttcgtcgtgaagggaaagagcacgaaggctaccacgaaggcataagcaacggagccctttacggcggccgcacttctccccttttccatgttcaaacaatcaggaagcatcgcagcaacgatgtaggcaacgcacagaacgtatgcccacacccaccggttgtttggataggcaaagccgttgaagaccttgccaatcagcggcaagcagagaaacacggtgagcacgatgaagatcacccgcaaaaacctgcgctcagcgacagaactcccacgggtctttgccgcgccctttccgaacaaaagaaacaccgccaaaagcgcaactgcggcgaatccgtacgagcaatcggcaccgacatctgacagactcccgaacccgagcaccagcttgacatagtagccaatggggtatagcagggcctccggacgatctagcccaaggcgaccctcccccaggatcgtcaaaacaccgggtacaaataggacggcaccaatcatcgctgcaacgagaatcaatccgcaaattttcatgagccatttcaaaaaccctcccacatgcttcctttcgggcaagaaagcgtagcggacaaggcagtacactacaagcagaaggcaaacggcataggctgtagtaactgatttcaagaagcagagggccattgcccctataaatagcagaggactctcccgagcaagcaccttctcgatgccccacaccaccaaagggcccaagagaagtggatagagcatgaatatctgcgaaaacgccagcagcgtatacccgctaaaaacatacaccatcgaagatacgagtaccgaaaagcgatccttggcacggtaaaagcagaaacccgaaaaggcaagaccagcaagatacaagtgcagcggaacggaggcattcaaggcaagatctgcgtattccatgggaacgagcaccgacagcaggttcaatgggtcgcccaggcttggaagaagcgtcatgatgacatctgcgccgtagcctatctccaaagaccaaacaggaacgacaccggtccttgccacgaagatattgtataaaagctcacgcaaccactcaccttcgtaggcgaagaagacatactgctgctcaagcccgtcaacattccagatgaaacccttgcctgcaaaaaggaagctgaaagacatagcgaagaacaaaatcaaaaatacgatggtatatgcagcgaagtacgatcgcttgctggtcgttccttcaaatgcctccagccaagccttgaagtgcgctctcatacgaaactgcgcccgctaaagtacgcaccgaaccacatcgccttagcgatagaaaggataaccaccccatgcctccttgccagctctccaactctggtattctattctataatgctaatcttgtcccgcccaaagcaggagaatgcgctgaaagcccggatgaccgggagagaccatcatcggctttcatcctcaaggccgaggtaagaatgccagaattcttcggaagtaagataaggcaaggcgttgcgatactccaatgccacctcttttttgcgcactgcatactcgcgttttaaagagcgatagcgtttcctcaagccaagataccgttcacgatccatggtacgaatatgcccctttttcccttcagcgtcaaaggcgacgagtgtgtttcgacgcatggttttccagccgggataagcaccgcggctgtaataaaccgaggccggcttgctggacagaagtacatcgggcagcatatgccggtcatgggggatcgcttcaagcaacttcaagaacatgttgcgtctatcaggggttcccagataggcatgatcgatatcgacttggctcattatgttcttatcaagctccgtaatcgacacaaggcattcgtttttggcaccgtttcgcttcataagcgcttcaccattgatctttgccaagtagtcgggacctttaagatagtcttccaatccgtcaagcaagagctcggcgctttcataattcatggatcgcaagtagatgttgaaagtacgcgaaagcctcagcataaacatatgttccgagctcttgtcatctacggcaatcatgatcaagaagttccgtacgtactgatagcaatcgaccgaagcgcgaaaacgcccttcaaagctatcgtgccaaacactaatcccgctcatgcacatcatggtcggttggcaacgcattccatactcaacatcatcgcagcgaataaacaggggcagcggtaaaccgtgtctgcgaatagctgtcacaggaatgcagcaaaaccaccaagctccataggcatttgcaacctctacgttgatagtttcgtttttaaccaaatcatgaattcgatcaacatggagatcgggtttgatcttgtcgtagataccgtcctttcgaacaagagcgacatcttcgtattgcaaggcgggctgatcgatcgaaagcatggcgccattcagaaaagcgtctctgtacttatcattaacgagcgaaagcaggttaaaagcgcgtttaaagctttcaggagaaacacagacatcatcgtccatgagcaacacatgcgtagcattgcttccaagagcggccagcataccacgggcaaaaccgcccgcgccgccggtgttggcgttggggataaccgtcaccccctcatcgctcagatcttccgcatcaagagtgcgcccgttgtcgacaacatacatgtgaaaagatttcgaaatcggctcatcgctcccgagcacttcccgcttaatagccttaatgttgggaatgacgaattcctcttttcgaaaagtcgtggtgcagagcgccagccgcaccgcgcgaacggcagattcttcaacctcagtgaagaacctcgcactgcgaacgaatgaggttccacctgatttgatgacgaacgagacaagcggagcgtcgctttctggcagctccatcacataggaacaaaaatcctcactctgcccgcacgctaaaagcggcatcgaatctatcgaagcaacatcggcatcctcgcgaagctctgcaaaaaaaatatcacatgcatctcccgcaacttcgagctcaagtttaataactccgacgctggtatagcgtttccacttttctagggaaagcgcattgaaatacgtggagaaatccaccgttcccgaaaaagaaagagcacctgtatccttatcgtaagcagcgcttttggcgcggtaatacaactcgggatatccgctcgcaaaatcatcggtccgaaccaacacattagccaaaggagccttctgcatagcaatctcactctcacacgatctcaacgcttttcccagctcttgttttgccccgagccctaaaaagacgcaacttggaagtagcctgacccctggtcgaggttcttgttgaaatacgggtcgcccttgctgcgaagacccggccatttctcgtcgaagtaagcaatatctgcctctgaaaaatcgagagcgttcaggctgttgtcataacgctctcgtgggctcttctcctcgcattccaccttgacagtgggcgtttggacgatacggtagcccaaattacgaaggcgcaagcagtagtcggccgtcccgacatctccttcgaaccgctcgtcgaatcctcctgcctcgaagaatgccttggcaggggtgaccaagccttggtaaccgactgcgctgcaattctggaaagcgcgcatgttacactggtatccggggaagtcatcaggatagccacgataaagcggcattatccgctttgaagtgatcgcaataccaaaacacttagtcataccgtccgcatagagggttttcggcgcaactgcgccaatgccccgcagcgagcacatgccgataagctgctcgagtggctcaggagttaaaaaagagcaactatcgtccatgaacaagaggtaatcgcctgtcgccgaacgcgctcctctgttaaagcactcaaacaatctttgatcttcgcttgcgataacatagctcccttgagcaacgaactcctctggcaaaacgcctctattcggaacaaccataatcagctcgcatcggtcgaagctgttcgtctgctcaaaccactcgacgaagcgagcgacagcaagtctttcgcagccgcaccttaccacgaccgatatcttttgatcgcctgaaacgccaaaccagagattgtaaaggctcgcaaccccagatgcaatgatgtccgcatcgagcgaacctctcttcagctggttttgtatggccagtcgagccgaccttctgctgtaaggtttcgaatcggggttcgttgccgttgaggcgtcgctgatgcgccaatggtagagcactttctgcacaccgtaaaccttgcgcgcctgactggttgcatataacagcatattgtagtcttgcgatccgtcataacgagcatcaggagcgggcatgccgtttacaatgctcctgcgaatggtcatgagatgcataatatagtttttcgaaagcagcaattccggagaaaacgatggtttgaacaaagggctcagatggcgaaaaccccctctgtcttccataaccatgtcttcgtcgcagtacaaaacgtctatgctactatcacgatttagcgcggaagcatactcgaacagggtgtcggactcgataaagtcgtcatgatccaaaaaacaaacgaagtcgccttctgcggccgctaacccacagttggtattctcggtaatgccgcggttgccctcaagctcaacgagcttcactcgatcatcgagcttagcatatgcctgcaaagccgctttcaattcgggatcctccggtgaggcgttaatcagcaccagctcgagattgccgtaagtctgccccaacaccgaatctgccatatcatgaagatatggcagaggagttttgtacaagggaactatgaagctaaacgtaggctcccaagaaaagcgtgagcctctctggttcgcaagatccacgccttttgctcgatggcgctcaaaccagtcggcatagcgagcatcggtccatgcgtcaataggaaagaactccggatgcacatccgcatggacaaaggcgtaacatcgctctttcaattttgacagcatccccattttgtctcccagatagcgcttcatgcactctcgttagcgcttcaacgatgcgaagccctcgttgaccttatctttatcgcttagcacaaccttggtgggatcaaaaacggaatctccttgcaaggcgggccatgtgataccaatatccggatcgttccaaattagaccgccttcgtcattaggatgatagacatcgtcgcatttatagcagaactcggctatgtcggacagcacgagaaaaccatgcgcgaatccacgcgggataaagaactgccgccggttctcagccgagatcaagaccccttcccatctaccgtaagtgggactattaggcctaagatcgacagcgacgtcgaagacctcgcccgatacgacacgcaccaacttggactgaggatgctctttctggaaatgaaggcctcgcagcacgcccttgactgatgacgattggttgtcttgcacaaacacagcatcgataccgccggcaacgaaatctgcatgcttgtaggtttccataaagtaaccgcgcgagtcgccaaaagactcgacatcaacaacaatgacaccttcgatagaggtctcggtaaacgtgaaattgccggatcgaaccgtatcgcccgctgccattctatcctccctattgtcctcgctcggcatacttggcctcgacagcatccttcgcgtcacgccaccatgcctcgttatcgcgataccacccaatcgtagccttcaggccttcggcaaaatcagtatgtataggcgtccagcccaattcctcgcgcaacttcgtcgagtcgatggcatagcgacgatcatggccgggccggtctttaacccaatcgaaatcatccgcatcttttcccatgttttcaagaatagcacgaagaacatcaatgttgcttttttccccatcggcaccgataaggtacgtctcgcccaaacgaccttgctccaagatggcccatacggcgcttgaatgatcctccgtatgaatccaatcgcggacattcaagccgtcaccgtaaagtttaggacgcactcccgtgaggacattcgttatctggcgaggaatgaacttttcaacatgctgacgcggcccatagttattcgagcaattcgatatggttgcccgtaccccataggtgcgatgccacgctcgcacgagcatatcagaagccgccttcgtcgagctataaggagacgaagggcgatacggcgtatcctcggtaaagcgcagcggatcgtcgagcgcaagatccccgtacacctcatcggttgaaatatggtgaaacctcacgtcatgcctgcgagcggcctccaagagggtaaacgtgccttggacgttggtacggacgaacggagcaggatcagctatggaattatcattatgggattccgcggcaaaatgcactatcgcatcggcttcaccaacaaggcgatccactaatgtctcatcgcaaatatccccatggacgaacgccatgcgatcttcggaaattccggacagattcgccaagttaccggcataggttaatgcatctagcacaaccacatgaacctcgggcttgttgtctatcacccaatgtacgaaattgctgccaatgaaaccggctccgccggtgacaaggtatgttttcatatctgtccttagcacatagtagttttacgcttgcctgattttaactcaatatgcaaaacccatggcactttccacgcaaagtgctccaacgggcatatgagtgagcggacctcctgctagcccgactaccggggtcagcccgaccgccgccccaaccccaacccgaccccttctcgttgcgatacgcgaaagtaatgtaaacgcctgcaaagcgaatattgcatgctatcatactgcaattgcggcttttataagaaaaggagaagagggagggcttcgagctacatgagcttttcgaaaacgtcgttgaagcgcaattggttcattctcacgtcccttgtctcaaaggacttcaagctcaagtatcgtcgcagcgtcttgggcgttgcctggtcggttttaaacccactgctcatgatgattgtgcttgccgcagtcttctcggtcgttttccgaggaaccatcgaaccgtttcccgtctatctgattctcggacaaacgctgtttaccttcatgtcagatgccacgtcaggcgccatgggttccatcatcgagtccgctccgctcataaaaaagatacgaatcaacaagatgctcttcccgctggagaaggtgatgtttgcccttcttaacttcgccatctctcttattgcggtagccatagtcatggttttctttcaagttgtcccaactttcaatatcttgctattgcccgtgcttttggcatacctttttatgtttagcttggggctcggtttactactcgcagcactgtcggttttttttcgcgacatcatgcatttgtggggtgtcattctcacggcatggacctatgcgacacctcttttctactctatcgagatccttcccgattggatggtctccgtgatgcagttcaaccctatgtattattacgtcacttacttccgcgagattgccatgtggggaacaacaccgggtcttacagaaaacctcatctgcttcggatgtggagccgttgcgctcgctttagggctacttgtatttcgcaagcagcaaaagaaattcatattgtacgtttagagacgagagatcattatgcctgaaaacgttaacacatcggctctttcgctcgacagctctgagacctccaaacccgttgataaccgcccagacatggtcagggtagaccatgtttccatggttttcaacatggcgtccgagcaattgaacagcttgaaggaatacctcatcaaaattgcgcgacgggaattgttctttgaggggttcacagcgctcgatgacatatcgttcgttgtgaaaaagggggatgttttcggcataattggcaccaatggatctggtaagtccacaatgctaaaaataatcgcgggtgttttggagcctacgaaagggcattgcgagatcaacggcaacattgcgccccttatcgagcttggcgccggattcgatacggaattatccgcgagagagaatatctatcttaacggtgcgttactcggctattcaaaagatttcatcgatgagcacttcgaagaaatcgtctcttttgcagaagtggaaaagtttcttgacatgccacttaaaaactattcgtcgggaatggtggcgcgcattgcattcgccattgccaccgtgatcgttcccgaaatccttgtggtagacgaagtgctctctgtaggcgatttcatgttccagaaaaaatgcgaggaccgcatcagcgagcttatcgaaaagcacggcgttacagttctcatcgtctcgcacagcaacgagcaaatagcccgattatgcaacaaagcaatctggatcgaaaagggccatacacgcatgctgggagattcagaatcaatctgtcgcgtctacggcggccttggaggtaggtccggcagctcaaaagccgaaaagatggtatttgacgctcttagagagtctgatcatttcgaaatacccgacaatacgcttatcaaaatacatggggaaagtgccgacggaacaaatgtaaagatggcgcttcgcggaagaaaagataccgatacccatacggtcatcatcgcttgcggaaccacgcatgttaacgcagttatggcgaaccctctgggaggagctcttggagctccaatcatcacaacaaagcccgatgaactctcagaagcagctgaacgcctactgtacgactacaagccagaacagattatcacaatcgactgcgggcgctgcgcttcgaaagccttcgaggtgttacatcgcttgccatggcatccagccatcactgcgatcgaaaacaacgacggcaacacttgggatatgtcaatgaagctgtatgagtatggcctgaagcgagggctttggtccaatgaggcctctttgattcgactcgacaacaatcccgaatcgcttgtcgcctcaccgtttctctatgattctaaatgtccgctttttgtcgcatcgaacaacatggatatcgatgtcaaggactttaaagaaacgctcgctcgaggatcgataacgcaccttgtggcattcggtgcagagccatttgatacgttggacagcaagatagtctcgcagggaatagctatcgaacgtatcgctgccggcaatcaagcagcatcatgcttcgccattactgcttgggtctatgaccgcatgaaaagggcacgcggcagggttgatgaactttgcgtcgccactctgtcccttgcccaatggccagagctgcttgcttgcggatgctacacctcacaacgaccgagcgtattactacttgaagacaatacgaatttggacagcatagcccaatgcctacaattcgtacgggatcgcaaagacgatctgcaggccatagtctcgataggcaaccagctggcacttggagaaaccgaactccagatgctctgttacgaacttgaatactaaccctcttcttctttcaaattctcaagatacgaacgcaaggcatcttgccacgtacgcatctcatcgccaatcgtcttcgccaaatgatcgttagataaagacgagtacgcaggcctctcggcacttaaaggaaaacgctctttgtattcaacgctggtcagcggtatcttttcacaggggatcgccgcgccgtcgaccaccgcgcaggcgaaatcgaaccacgagcatgtacctttgttggtgcagtggtaaacaccataatcgtcggtagctgcaatcttgaggatctcatacgccagatcattggcagacgtggggttgccgaactgatcggaaacgacgcttatcctccccttctcatgagcgaggcgcatcatagtctttacaaaattcttgccaacgtaaccataaagccaagcggtgcgcacaacgaaagcccgttcgcaagcagcacgtgccaaaatctctcccgcccacttcgttcgcccgtaagcggaaagaggacgaacaggatcgctttcgctacgcggttccgggtcagttcccggaaatacataatcagtggaaacgtgcacgaacttacctccgcacgtttcgcacgcaatcgccaaattctcagctccatatgcattgactcggaatgctgctgcctcgtcgcgttcacagccgtcaacgttcgtcacggccgcgcagttgatcacaaggtcataaggacccttttcggagaaccaagctgccacagctgctctatcggagatgtccagattgtcgtaatctgcataatctacccgcgcatcggcatacaaccgatctatgggaccgatttctgcagccatggattccaaacaacttcgaagctcgttacctaactgccctttcccgcccgtaacgagaatattcaagcctaatcacgctccttatgggaaatgatcttgccttcggcaaccttcctcaagtgttgaccgtaaaccgactttccatattttgcagccgcatcaagaaggcgatccttgtcaatccagccattctggaacgctatctcttccactacagacaccgaaagtccttggctgcgctcaactgctctcacaaattcggaagcctcgtagagcgactccatggttcccgtatcaagccaagcatatccgcggcccaacgtaacgacattgagagacccgccctctaaatacatttggttgagggtagttatctcgagctcccctctcgcagagggcttgacccgcttcgccagttcgcaaacacggttatcataaaaatacaagcccgtgactgcataattagactttggatgctccggcttctcctcgatagacaccgcattgaagtcctcgtcgaattccactaccccaaaacgctcagggtcatctacatggtagccaaacaccgtagccccgccctctcgttcagcgcttgcaaccgcatcccgtaaatgacgtcccaaaccgttgccgtagaagatgttgtcgcccagtacgagcgcgcaactatcaccggcaataaaatcttcgccaataatgaaagcctgagcaaggccatctggactaggctgctccgcataggaaagactcacgccgtaatccgagccatccctgagcaaccgttcgaaattcgagagatcttggggtgtcgaaataataaggatctcgcgaatcccagccatcatgagtatcgacaaggggtaataaatcatgggtttatcgtacactggaagcaactgcttgctagtgaccgaagtcaatgggtaaagccgagtgccagagcctccagccaaaataatgcccttcatttcgctcctcagatagactcacaaccattacaatttcgatttaaatgttagcgtacaccagaagttatgtggaacagcttgatcaaaagccaccaagaaaaccaatcggcgctttttcttttatactaggaaagcatgagcacaatcgacatttgaggaaatcgcatgaaaatcagcaccctttgcgcatgccgcggcgacggcagaggatacattagcttcaaagttacgcaattaaaccaaaacagcagaatgaatctttcgggtgtggctccggcaggcaaacaggtgcctatgcaactctacgtaacagccgagtcggcgcgagaaaagaccgtagtgatcgcgtttcccctcgttccatgcaagattgactacacactctcagaaatcgacagggagggcaacacgctatcttcctgcaaaaagagcattcgaccttttatcttgaagtgggcatcgcgctacaactatcgattcaagaagcagcaatgtcactccattcgagatattgaagaagtggactacttcaaacatgcaaccatagatttcaaagagtgtataccgaccgccaccgacacgatcctgcggatcaccttgacgcttcccacccgaaacgatattccatacaagctcaggctcctcgacgaaaagtttaatcaacttcccctcaactcaaccataatgaacgactcgcttgtgtcgctcgaatacgacgaagtatccgagctgagattcatagatatctcgttgcgcatcccccatgatataaagacgtacattattgagttcaccgatacgtcggataccatccggcaaaacttcgcatgcttggagacaagtctttatgcttacctcctcaggcggtttcacgacctcaccctcgatgcagcccatgatcccaagtatcaagcctgggcctcaaagagaaagcccacggacgcctttactaaacagcagaagcgaacgagattcgaacatgcaccgttaataagcatcatcgttccgctctttcataccccccctgccttttttcgcgatatggtggaaagcgtgctagcccaaacatacagcaaatttgagctcatcttggtcaatgccgacaggagcaatagcgagctatccgcagaagtcaacgaggccctctctcgcgatcggagaatccgggaagtagagtgccctgagaacaggggaatctctctgaatactgcggagggtatcaaagtcgcgcagggggactatcttgccttccttgatcacgatgacctgctggagccagatacgcttttcctatatgtttccgcgataaacaaagatcccagcatcgatcttctctactgcgacgaggataaacttttccctgacggatcatacggcgacgcttactttaagccggacttcagtctcttccttttgcgagaaatcaactacatctgccactttctaatgatccgcaaaacggtcgtgtcgaaaatggagcccccggatccgaaatacgatggcgcccaagatcatcacatggtcttgcaggcggttgatcaggaagcgcacatccatcacgttcccacggttctttatcactggagaatatgtgaaggctcgacggcggctgggacagcgagcaagccgtacgcagacgttgccggaaaactcgcaatcgagcatcatcttgagaagcagaggatcaaagcccgcgttgggaacacggaagccccgtgccgctatcgcgtaacatacgagccagcgcaacaacccctcgtctcaatcgtgatacccaataaagacaacgccgaagttctcgccgtctgcattgactctatcctcgagaaaagcacttatgaaaattttgagattataattgtcgagaacaacagtacccagcccaaaacgtttgactattacaccagtattgccgaacaagactcccgagtatcgataataacatgggagcacgaattcaatttctccaaaatcataaacttcggcgcatcgaaggcaatgggtgagtaccttatcctcctgaacaacgacaccgaggttattagcccccgctggattgatgacatgctcggaatttgccaacaatcgcaggttggtatcgtgggtgcaaagctttacttccgagatggaaccattcagcatgccggggttggcattggcggcgaaggcgcgggtcacttgaacgttaatctggataaaagcgcgtcgggatatttcaatacaaccatcacaactcacgagctcagcgccgtcaccgctgcgtgcatgatgaccaagcgttcggtgttcttcgaggtaggagggtttgaagaagatcttgtcgttgctttcaacgatgtagattattgcctcaaagtaagacgtagtggcaaactcgtggtattttgcgcagaagttgagctgtaccattacgaatcgctatcgagagggtatgagacgacggagagcaagcagatcaggtttcatcgagaggcatccctgctcaatctccgttggcctgaattttatgttaaaggagatccgtatttgaacccgaatctttatcctggcaatatgtactatcggctcaacgaccgaaacctttgatatgattgattggttcgaacgcgcaaagcagcagaaacgttcgagctaccgacataagaggagacaaccttgccatcgatagcgacaggtaagcagggtgcaggaaaagacatggttcagcgctgcagcccgtacgttttcattgtattcgcttcagcttttgtcgcgctttacggtgagtcgttctatgaaatatgcagaggatattactcgggagagtatcttgggcttattacctctaccatgacatatggagtagccgcacgaacctgcttgctttttctcatttcgattgccgtttcttttgcctttttcaagctgtggaagcatctatcaggatacatctaccgatttcgctacctcattgcgggtgtcattctcgcaatttgtacgatatttgaaattagtggctcttctgttggctgttggagcccctatttgaatgaacccgcaagctcgactacactttttggaatcccacgtgcaataagatctgatgaatggctcgtcaaccttcccaccttcctttcgcaatcgtttaacgactacggcacttcgtcttcgatcctgcgcggaacaatcaccgacacaacaatgcccatcagcgcgccttcgtggtcattggcaacgctgttccacccttttcaatgggggtatcttgttttcgggtcagcgaaaggggtggcgttcgagtggacgtcagcgaagttggcactaattatggtatctttcgaatgcgcaatgctctatacccggaagaataaggccctcagtgctgccgccgcaataatgctgtccttttctcctttgatactctggtggaacacaggagcggcccttgtcttcgggcaaggacttgtcattgcgttgtaccacctcgtcaaccgagacagcttcaaagtcaaacttattgcttcgatcgcccttgcatggcttgcagggtgttacctcatgatgatgtatccagcttggcaggttccgttcttctttatttttgcagtcttcggcatctgggtgattttgagttaccgaaagaatacaaaaggaggctccccagaactacgcacgttcgcacctcgaaaaagcatcctcctcttgcttctttgctgtattgcagttgtcgtcatgattgtccttgtgtttgtcggggcacgtgatgcactccttgctaccacctctacagcctatccttcagggcgcgtatcgactggcggtggcttaattccctatttattcggctacggctcaagcattttcttgcctctatcctcagggcagatcaacgcaagcgagttgtcagtgatgttcacgctctttcccttggggctcattgccggatgcgtcaattcctacaagcgtaaggatgtgctttctcgacttctcgtgaccctagagatcatcttcctcatttacggtattttcggctttccagaatggctttcgcgaataactctttttagttacattcccactcaacgactcctatttccgctgggctgcatcgacatctttcttctcattcgcgccctttcgcaatgtgaccgccccttagtgaaacctcgtccggcgaccctcatcgcaacaggactcgtctcactttcaatattcattgcatgcctttcaaacgcattgttcgatatgttgtttgctgagaagatcacgatgttgattgcgattatgctcatctgcacaccatgcatactcgcccttgtcacaagattctctgtgaatatgtttgccgcctctatcgcctgcgtcctcctctcaaccggtctttgtgttaatccaattcaaaaaggactcgatcctctcacagattccgccttgtattccgaagtcaagcagattgcagagtccaacccgacgggattatggatagccgaagacacaatcgctatggcgaatttttgcgtcgcagcaggtgcgccaaccataaactcaacgaacgcttacccagatttggaaagatgggaagcgcttgaccaagagggaacctgcactgagatatacaatagatatgcgcatatagtaatatcctttcaaagcaccgtcgataccacttttaatcttctgcaggacgatgcgtttcaaatcagccttaattggagtgatctcgaaaaactgaacgtaagttatatcctgacccaaaatacataccccgatacaccagtagaaggaatcaagctttcgctcattgctcagaataacggatacaacatatatttgattaattatacttcacagaatactagcaagcttgctacctgataaatgaagatagagagaaacatcgagcgctttgggtattaatcgaatagaaatcctacgtataggtcttgctgaatcgagctgtaacactacctatgcagatcatataatctcaattgatctagccaaacaaggcgggtaatgatgtcgaaaacaatcgaacctctgtccgtaaagcataatttattgtggaacacgatagggtgtttattttatcttggctgccagtggcttacgacgattcttgtagtcacactcactggagattacgcaaattccggccttctcgcgtacgccatggctgtaggcaacattttcgccccaatagctctttacaagattcgtgcctttcaagtatcagatttaagtggggaatacacatccggtcactacttaggttttcgattatgcaccatagttggagcaggcttgataacgaccacatatttagttacctctacagatgcgttctcattttttctcacatccttaatttaccttcttttcaaagctgacgaatgtttagcggatgtactgtacggaattgagcaaaaaaataggcgaatggactatataggaaaatctcaattattacgggggcttttatcattatccaccttttgcattttcttgcttttgtcgaatgaccttaattatgcaattcttgccatgtttgcagcttgtttctgcgttacactcttttacgattatcctaatgtaagacttttcggagacgtgaagccagttataaaaaaactccctatgctctcgcttgcgaagaactgcttctcgattatgatagcaagttttttcactgcctcaatggtttcaatcgttcgtcagtattttgggtctacgttcggggacgaagccctggggatatacgcagccatcgccactccagcagtgctgattcaagcttccgcatcgtatctttatagtccaacattggttcccatcactgaaatttggaaaaagggagaccacgcaaaattcgtgaaaaccttttcgaggatagccttagcgctcttacttgttatcatcgcactgattcttgttctttctattggcggaatctacctcctgcctttcgtttttggaaacagtattcaaccctatctctatcttttgcctttcgttttgatcggtacaggagccatcggattactatggtttattaatgacgtactaattattatgcgctcgaaaaaatggcttgtttttgatagttttctagcctttttcatatgccttacagcaatgattccgcttattaattccttttatatgaacgggattaattatgcaatcattttcgcatgtttaattggcattattttgggtttagccggcataaccacaagtcatcgaccaaggaaagcatagacttggcataaatgctgttggagactgacactgaatcataaattcttccctcgtacttttactctatgataaaaggacgaggttgaactattgagcgactatatttgatacatcttctctgcatgcataagtacagtaacaccatcatacttgttactactttgctgattttcctctctcacctacaaggaacatcacttcgaaaagaacggacagccattccttgctaagacgagcaagcgatctcatgtaagacaattgacgacttttcgtgtttcacctcatatagagcgccttttcttattgaagacacgtcgtcaaaaagcgcatgatatgtttcgatgaaatatgtatctacattatgtagatacatatagtcataccctgcgatacgacccgagaagccttcgatatcggtatcgacattccaataccattcgtcagaaggaccgaaacaaaagttataattaattccatctgcattagttaaatgaggattgatgtaataggcaatttcccatactgcatcccccgtattgttctgcgaaacaacaaaaaccgaatcacccgagtcgagggatcctgcgattttatttgcctctagttgcgttgccctgacatcttgtgcaaatagcgcaggtttagctctcaacaaactatccggcggaagaacaactaccgctgcaagcaatgcgcacatgaaaacataagcaagttttgcttggctgcaagaacgcttaaaaagccaagttaaaacagaataatatatcaacacatacgtagtaattacatacgttcccatatatcgagaatacgacgccaaactgggcccctcataggacccaaaggaaaatgtatacaaaaacatcataacgaatgcatatagtattgatccagaagcaattaagattaccaagaagagcaaccgacgtcgatcagcttttttactcatcagtaagagaagcagcccaagagtgataagggtcataagttgaaaataactcaactggatcggatgagacacaatgggcgtcgacaaaacagcagaaataaagttggacattgcaagatgctgccaagtttccccgccgcttcctgctgcaataccaggcatctgaaaaagctgtgagaagcttacgtgaaactgagattctaccgcaagcgcctgtatatagctattccatgatacgtaggcaaatactggaaacactcctaccccaattgagataaagatgaatccttgcacggcttttctccgcgtactataaactccttttttaacatgcatagaccatctagctatcaagaccaagaccactaatccccaaaagaaaatccccatttgcttcgatagaactataaatgcaatcgaaattccgatgaatgtagcaccaaccccatgccggtagtcttcctttaatgccaaaaatatgcaccaagctccgagcacgccgaaagcagggtcaatatacaccgttgtaaagtattggcttcccgttggctccgataagcacaggataaagaaaagtaccacggccataaaacctactattattcgccattgaagtttgcttcgatggcgaataatagtatcaaccacaggaaaggcaaatgacaaaataaagatgtgcagtgctctataaaggtaagcctcttcatagcaaccgccggacaagcggcaccataaccattctataatctgaatagccggaggataatccttatgcaccgccagaacagaactgtcaaccgaataaaacgtattgaggcgaagcatctcctttatcataacaccccaatgggaaaattcgtcccagttagtgaatgatcggtttaaatcatagaggtatacgcctacataggtcgtaacaaaaatcagcaaaccaggcgtgcaaaaccgttgattgagccaaaagctactttgatgatcgttgcgaaaatgcacaagtttaacagtataaataacaggaaaggaggcagcccaaagcaagaggaaacagaacccgggctcaaagtttccaaaaactagagcactgctgtagagtacaagtcctccacccattaatgtaataggcaagcaatgtccgaaatctcttcttgaaagagctaccgatgtcccgttagccagcacgagaaaaacaagcggtccgattaaccccataattaacccttcttaatacaggccccagtgaaagaaactgtatcgaacaaatcctttcacgcaatcccagtttccaatattacacgatcgtacacattaagatcttgacgttcttctcccacgtgtgcatataccgcaaaatttcgactcaaagaatagaccgaacctgtgtcccgagaatcagaactctaaggataattttcccgtatcccataatctagagagatcaagtaaagtctgagaaggcattgtgacgcaaacgcagattgcgctctaaacctatctgacgtctcggcaagaaacatcgcgtgccccaatgatagagagagctccttctctctgccaccatgagaggctcttggcgtacacagcaactcgagcatttatgcatccataaatcaaaaagaccgagaaataaagaccatcgttgccgtccgagcaagaaaaattagtcgcaagttttgaaaacccgctgacatcatcagggttgaactaataacggggtggaaatcgaaccacccgcgtaaatgatcctaatcttacgatcaagatgcgctctgcgttgactccggcataaagagagtcgcattagaagaaatccgccacactcatcaaaccataccgttagcgccccgcgacggctggcgcgcgggaggtctttcgggtaggataggtgcattcgagaatcgaggagcgaaacgtgcaagagacgaaggacgcgcaggccggggcgccgcgcacccagaacgtgcccgagcagggcagcgtggccgtgctcatcccctgctacaacgaggccgtgaccatcggcaaggtggtggacgacttccgccgggtgctgccggaggccacggtgtacgtctacgacaacaactcctcggacggcacgggggccatcgcgcgcgagcacggggccgtggtgcgctgcgagcggcgccagggcaagggcaacgtcgtgcgccagatgatgcgcgacatcgacgcggactactacctcatggtggacggcgacgacacctacccggccgaggccgcgccggagctcctcgcccccctcgtggccgacgaggccgacatggtggtgggcgaccgcctctccaacggcacctacggcgaggagaacgaccgcgccttccacggcttcggcaacgacctcgtgcgcgtgctcatcaagtggatctacggcttcgagttctccgacgtcatgaccggctaccgcgcctacaacgccgtgttcgccaagaccatgccggtgctcagccccggcttcgagatagagacggagctctccatccacgcggtggacaagcgctggcgcatcgccgaggtgccgatcgactaccgcgacaggcccgagggctcggagagcaagctcgacacgttctccgacgggtgcaaggtgctgctcatgatcctgtcgctgttcaaggactaccggccgctggcgctgttttcctgggtgtcgcttctgttctgcgtgctggggctcgtggcgggcgtgcccgtgatcgcggagttcctggcgacgggcctcgtgccgaagctgccctccgcgctcctggccgtggcgctcgtgttcatcggcatcttgagcttcacctgcgggctcatcctggacaccgtggtgaagggcacccgcaagcagtacgagctgcaggtgacgagagcttacataagtcacaaaaaataattctggaaaggcgtagataaacaacgacgtagctggttttaaaaatgcaaactcgatttttcccagcaacacccttacaggctcacgatatgtaacagtttactgagaacgatcagagttgttatgctggggcggttttcatcatctcaccgataagtgcaaccaattcaacaccgtaatactagatgtagcccatttcccgcccaatgattcaacggttggcgcacaccctcgtttgacatatccgaagcgaggatctacacaaacctgcaccaactcctccgtggaggcatatgctttcaagtgctgcacttgggcgcggagcccagtgcgcacatctgcaaacgagtttccaggaaccccatttccggttgctccaatcccagcaaaattacactgctccgccttaacgtcacccccgaactgcaggtaacctgtttccttcatcgcctgtgcgaacaccacctctgccctcacgccctcaacagcagcctcttcgcagaggatagtgcaaaactgctcgatcgttccagcgccctttccagaatacgcatcagctggatacttcttgcttttgctactgaagaaggcggacatctgggatgcgtccacgttcgaaacacccatgatgccataaccagatgatcctttatactgcatgcccaccgacgttgctccgactagagctgtcacttcgttgcccgccgtcagataaacatgggcggaatatgttcgctgcgttgatatactgtacttgtgatcccggatatttacgagggccctccagcttccgtcagattgccttgttgcgtcataccaccttatatcgctttgatcggctgcagaccaaagcggcacttgaactttcgacacgccggatgcagatgacacgtctctcacagcaacagcaaacgttccgagttcttcattttggctctcaatcgaaaccgaggccgacggctcatctatggtaaaagtcgttgaggaccatacgggttccccgaacactgttccgtacatatgcacattgtacgatcctggagatttgtgagacgagatagggatggtagctctccagatgccatcaaccaagctatacgaagccgagtaccatatcatgtcgtcctgcccaccgacatcgctccacaccgggaatctgacagccgaagaagcacccaatcgtcctcccgatgcctcgacagtcgccgttttctggtcggcagaaaccgttgccttcaaagtgagccgccgctcgtcatcaccgagctctttagaaatgctgaacgtcgccgaggccctcgggaggcactcgccggcgtaggtggcgtaggcctgggccgagtactcgccgtaggcgccgaactcggcgcccaggtccaccgaccccgtccagctgccgtcggcctggcggtagccctggtaccacttggtggggccgccgccgggggcggtgaccgggaagcagacgttggagggggtcagggtgaagccggacgccttgagccgcagcgtgccgtcggacacggcggcctcgaaggccacggtcggctccgcgacgctgaacgtcgccgaggccctcgggaggcactcgccggcgtaggtggcgtaggcctgggccgagtactcgccgtaggcgccgaactcggcgcccaggtccaccgaccccgtccagctgccgtcggcctggcggtagccctggtaccacttggtggggccgccgccgggggcggtgaccgggaagcagacgttggagggggtcagggtgaagccggacgccttgagccgcagcgtgccgtcggacacggcggcctcgaaggccacggtcggctccgcgacgctgaacgtcgccgaggccctcgggaggcactcgccggcgtaggtggcgtaggcctgggccgagtactcgccgtaggcgccgaactcggcgcccaggtccaccgaccccgtccagctgccgtcggcctggcggtagccctggtaccacttggtggggccgccgccgggggcggtgaccgggaagcagacgttggagggggtcagggtgaagccggacgccttgagccgcagcgtgccgtcggacacggcggcctcgaaggccacggtcggctccgcgacgctgaacgtcgccgaggccctcgggaggcactcgccggcgtaggtggcgtaggcctgggccgagtactcgccgtaggcgccgaactcggcgcccaggtccaccgaccccgtccagctgccgtcggcctggcggtagccctggtaccacttggtggggccgccgccgggggcggtgaccgggaagcagacgttggagggggtcagggtgaagccggacgccttgagccgcagcgtgccgtcggacacggcggcctcgaaggccacggtcggctccgcgacgctgaacgtcgccgaggccctcgggaggcactcgccggcgtaggtggcgtaggcctgggccgagtactcgccgtaggcgccgaactcggcgcccaggtccaccgaccccgtccagctgccgtcggcctggcggtagccctggtaccacttggtggggccgccgccggcggtgaccgggaagcagacgttggagggggtcagggtgaagccggacgccttgagccgcagcgtgccgtcggacacggcggcctcgaaggccacggtcggctccgcgacgctgaacgtcgccgaggccctcgggaggcactcgccggcgtaggtggcgtaggcctgggccgagtactcgccgtaggcgccgaactcggcgcccaggtccaccgaccccgtccagctgccgtcggcctggcggtagccctggtaccacttggtggggccgccgccgggggcggtgaccgggaagcagacgttggagggggtcagggtgaagccggacgccttgagccgcagcgtgccgtcggacacggcggcctcgaaggccacggtcggctccgcgacgctgacagaagctgaagaaaccgcaaacccggtcacacccttatcgaggctgcaccatgcctttacctcatagcttccatagcttcccccggctatattcttctcacaactccacgacccgtccgcctgccgcactccttggcagtaatcgatagctcctgtcggatcgacaacagaaaagctcacgttatcgggaggtgccccccagtttgaggtgttcattgacagaatatcgccatttagctcaaccgtcatatcggttttattatatccgacatcaatatgacggtattccttgatagagccgtctatggtagcgtaggcgcagacatcgtagacaccataagttgctcccaaatcgaaagaccctgtccatgacccgtcactttgctcataaccttgcacccatgtcgtttcgccagtaggagccaaaacggagaagcatacattgtcaggatcgaccccccagtttcgcgtatcgagctcaaggatacttccattgatctcagaatgcacttctaccctgctcttcgaaagcccgtactgttgagcgatcccggttgcgtcggcaacacccaaggctctcaaattgccttcattgctcaaaaaggcagcgtcagaggcgttgtcgacaaatgcatgctcaacaataataccgggaataccatatatgcggctttcgttaatcaccgtatagaaatccgctagatgaccgtcttcgtaataataaggtccagagccttgataatactctgaatcacggactttcacaccgcgattagctagccctagtgaagtaatttgctgcaggatcttcgttgcaagagcctcaccggtcacatgagtttggtgctgataagaacttccgttcggaatatatacttccgccccggagccgccgctcgcattgcagtggatactcacgaaaacgctggcgccttgctgtacggcccttgccaccctatccaacagaccaacgtactcatcaccagttcgcgtcattaccacacgcacaccgtaatacgattccaattcctgctggcaatactgcgcgattttgagattaagattcttttcaaccaaaccaaatccagacgcaccaccatcgctaccgccatggccggggtcgagcgccaccacaacatcagaatccctgcttgtggcacttcgcgattggcgggaagatgctgcaagcccgtattcaccttgtttgttagcctgggccacctctatcgcgctttctaagctgctctcttgagatagagttccagcctcatctatcgaatagacggtaacctctccaggatcggcttcttcagcaaacagcgacaccgacgagagcaccttgaaagaataatggacatctgtgtactggaaaagatcttccgtctctttttgaccaccagcattcgagtaggagaaacttataagctcaattctccccgcctccatctccgtcgtgtcgatcggaaaaagaacagctccttctacggtattggaggcagcgacaacccactctccaccagtctcggaacgtaccgttaatcgagcatcagataccgacgggacatcatcggcaagtccaattaccacgttttgaattccaccaaagtcgatctctggcgactcgacatatacatatgcagcagccgaagtttcagcgttttggtcggattccttcaaaacggtgtcttcagaagtttcgctctcaacagaagattcttcgctctccccagaagccttattctgctcgctttcgtcaacatcgtctgtttggtcggaagctgccaattggttgctttcagcttcggcagagccagactggaaatcgggagcttctgcagtctcagaagcattccgagtccccacagactcaaacccgcctccattgtccatatcgtttttcccttgagcaaaagcgaccgagggaaccatcgatgcgacgaggatcaatgataagaagctcgctaaaagtttagataccattcgattcacgcccactccgatctacaccgccgcctattgttcaattattatcgaattagcagaacgctatcgatcatgataccgcacactgccccttctcaaaaccaaaaagcttattccgcagccgtgagtgcgcacaaaaaacgccgcaagcgtaggcgttcgctgatctaggttttctgaaaaacccgcactatgaacacgaagtatgaattagtattgtaaggtagatcaagcgaaagcaagcaaaacgtcgagctcgaaaaggtccaaatgaaaattctgctggtgatccctgcttataacgaggaaaaaagcatagtttcagtagtggaggacgcaaagaagcacggatatgactacattgttatcaacgatgggtcgaccgatcatacgatcgacatatgcaaagaacacggaatcaacgtgctcgaccttccaagaaacctcggtatcggaggtgctgtgcaggcgggacacaaatacgcataccggcatggatacgatatcgacatccaaattgacggagatgggcagcatgatatttcttccattcccgtcttaattaaagaaatcgaaaacggcgccgatcttgccatcggatctcgtttcttaaaaaaaaccgacgggtttcaatccaccgctatgaggcgcttagggataaagtggttgtcgggactcatatacctcctttacaggaagaaaatcaccgaccccacatccggacttagagcatccggtcgtaaagcccagcgcctattctgcacatcgtatccaatggattatcccgaaccggagtctattgccgaagcactaaatagcggcctcctaatcgcagaagccccggtgaacatgagggagcgatcggagggaaaatcatcaataggcactgtttcgagcgtgtactatatgattaaagtttcattggcaatcttgatttcgcgcttcaaaaagcgcatcaccctctaggagctgcttacgatgaccggtcctgcaagaatccttatgattgcaatctgcgttttatttatcgtttatattataaccttggtaaccaagggcaagctattgctgaagtactcccttctttggctcgcactctcgtttttcgtttgcgtattctccatgtttcccgaacccatctatgccctatcgaagctgctcggattcgaattggcttcaaatttcattttcattgcagccgtgttctttctcttggtcatagccttgtccttgagcgtcattgcaagcaaacaagccgcttatacaaaaacgcttattcaagaagtggctttgctcaaaaaagaacaatcggaatttgaatccagctgcgacaattcaccaactcatgaagaaaggtaatatttcacctttcttcaaatagcagcgtctccaaatcggaaatgaccttttttcgggaaaaccttgcgtcgaaatacctacgtgcatttgctccaaacatagcgagctcattgccgctcgcatccctgaatctcatcaggttgttggcaagggaatcgatatctcctgctgggcttacatatccacactctgcttgccggactgcagtcgcaccctccccgtcaagacaagcaataattggtctaccggccgccatgcagcttgccacttttgcgggaatagtaagttctaagtccttattctcggccaacgaaacaaccatggcatcggccagttcggaaaactgtggaatatcatgagcctcaaccctcccgtaaaaagtgacgtggccggtgagaccctcttctttcaccaattgctcaagagacgcccggctcatcccatcgccgaccataagcaaatgtaggtcatcgaacccattcctatgggcttttcctattgcttttatcaggcagtccaaaccctgagctggactaaaattacccgcaaaaacaagattcgtttttccgtcgaatctctcatgcagttcgctatccctcttcagcaaagtatagaaatcttcagcatgctgaggaactacatgaacagaacggcacttggagccaaccctgtcgaacaatctctgctgcaaagacacgctcatagcgattaagcgatcagcttttgagtagagcatgtcactgatcctcgaagcgatattcttaagccacttcgacgaaatgggcaaaactgtatagagattttccggccatatatccaaaacgtatacaacgagcggcgccttgaacttttttgatgcccttatagccgggataatcataagcaccgggctcgtgttataacaaaaaactgaatcatacctaccgggtaaagagcttacgcgaaagaaggctcgaataggccagcttacataattcagaaaaattctaattgaagtgttaccctttcgaggtatctctttcgctcgaaacacatttgccttttcgaaagtttcctcgaagggacctttttcggtataccccggaaaccactccccttcagggtaattcgggagaccgcaaagaacgtccacttcatagccgtcttccacaaaaccgctaacaatatcattaatcctaaagttctccggataaaaatgctgcgttacaacaaggattctctttccggtcacgtagcctagcctttccgccaaaccatcttatcaacgatccctgtgtaagactggataattttcacaactttcgtgctcacgttgatatctgtgtatactgccacatcagaaccataatctcccgactcagtcatacggaccgcaacgtctacagcctgaagcactcgatccgtcgttatcgacccaaggacaaagtttccagcgtccaatgcctcgggtcgctctgtggaagtacgaatgcacaccgccggaaagggtttgtcgcagctgttaaaaaagctcgactcttcagggagggttccagaatcggacacgacgcaatacgcattcatctgcaagtgattgtagtcggtgaacgagaggggcttgtgcgtcctcacgagcggatgaaatcggaacgagcgcttgtcgataagcttttttgatcgcggatgcatgctgtacaaaatgggaataccataagtctcagccatggcattcacagcattcatcaacgcattgaaattgcactcattgtcaatattctcctccctgtgagcagacagaagaatatatcctttggacttgagtccaaggtgttcaagaacacgagacccttctattcgatccatgtgagccgatagaacttcagccattggagagcccacgacataagtacgctcttttaccgttccttccgcattcaagtatctccgagcgtgctctgagtagcaaagattgacatctgcaatatgatcgactatccgtctgtttgtttcttcagggaggcattcgtcaaagcacctgttgccagcttccatgtgaaatactggaatatggagtcttttcgcggcaatagcggaaagacaactattggtgtcgcccaaaatcaaaagcgcatcaggactcattcgtacgaggcactcataagacttggcaataacgtttccgatcgtctgcccgagatcatcgccaacaacatcaaggtattcgtctggctggcgtagcttcagatcgtcaaagaatatttgattgagctcgtaatcgtaattttggccagtgtgtacgaaatattgatcgaaataggtgtcgcatttttttattacctcagatagacgaataatttcagggcgcgttccgacaatagtcataagcttcatgcgcgacatcgctatacctccagcgcgaacgtatcggggtaatcgggatcaaagcattcattgcaccacattaccgtcacaagattctgctcattagacaaatttacaatattgtgcgtataccctggaatcatgtcgacaacttgcagctcatcgcctgtaacctcgaattcaagcacagggtattcagagccattttcatctttccctacttttctaagctgcatcagtccatgacccgagacaacacaaaacttctcccattttgtatggtgccaatgttgccctttaataactcccggctttgacacgttaaccgaaacttgcccagcattatgagtatgaagcacttcggtaaagcttcctcgctcgtcctcattcattctaagaggaagggcaaatttctctggaggcatatacgacataaatgtcgtaagcagttttttcgaaaaagagcctcgagggatattcgggatgcataaggatgctcgagaatcattgaattctttaattaatgaaactatttccccgatgctaaccctatcaaccggagcaaccgaacaataacctcccccgattcgattttctttaccaattaatgcggaaagtaactccgacaccaaatcatcaatataaagcagatccagctcaacagaaggatcattcacggtaaccggaaggtcattggcgatgttgtagcagaatgtcgcgactgcagaattgtaattgggacgacaccattttccgtacagatttggtaaacgatagatcagaataggtatcttagttctctcagagtatttcaggaacaattcctcacctgcaagtttactttttccgtattcggaattcgcatatcgccccttcagttcagcttgaaccgaagagctgagcataatgggtgccttgttttcatatttctctaatgtttctaaaagctgttgagcgaagccgaaatttccagccatatattcttcagagttttgcggtctgttgacccccgcgagattgaatacgaaatctgcctctcggcaataggcgtcaagatcctcaaaactggaatcccgatcatattcgaatatttccaaaggaagcatggcttgatataaggagcgcctgtccttcccatcacgaatgcactttagagactcgacgagattctttccaacaaaaccccttgaaccagtaaccagtaccttcattacctcacccactcatcgagcgcttccttaacataggacgcagtcttgattttctccatagtgccaccaacatccaaacgttcggtattatgacttgtatatgaatcatcggcttgcgtctcaacgtcaccattcaccacaaatttatcatagttcaaatcgcgagaatcggctcggacgcggtagtagcaacccatgtcctcggaacggagcttctcctctcgcgtcataagcgtctcaaaaagtttttcaccatgacgagttccaatgactttgatacctgtgtttccgaacagattttgaaccgccttcgcaagatccccaatggtagaagccggcgatttttgcacaaataaatctcctggttcagcatgagagaaggcgaattccacaaggtcaaccgcttcatcaagattcatgagaaaacgcgtcatatgagggtcggttacggtaatagctttaccggatcttatttgatctacaaataaaggaattacacttccccgcgagcacattacgtttccatatcgagtacagcaaattgtagtacggccggcagcaatgcgcgcattagcatatactaccttctccatcatcgccttcgatgttcccatggcattgatcgggtaagctgctttatcagtcgatagacatacaactttactgacgccctcacttatggcagcatgtagaacattgtcggtacccaatacattggtttttacggcctcaataggaaaaaactcgcaagaaggaacttgctttaaagccgctgcatggaatacataatcaacagaatgcatggcatctgcaacagagcgctcgtcgcgaacatcgccaatataaaattggaccttattagcactatcgggatatttagactgcagcatatgccgcatatcatcttgttttttttcatctcgactgaaaatgcgaatttcgccaatatcttctaataagaaatgattgagaaccgtatgcccaaatgaacccgttccaccggtgatgagaagcgtcttgtctttaaaagccgagtccattctttatctccttatcgcatgaccacctatcagcatgcttccattatctcccaaatagctcaaaagaagatcccgaagacacaatcagcagggaaaaccaatctgaaaaactgggtggcaaaattccagagtcatctgaagcgcccggctcaatttactaattgggcaatctgaagaaatgctattttagggatgctgatcaccttctgaatccccagaaagtcttcttcgggcgtacaatggatgtgaaagttgcttcaaaaggttacaaacaccagaacaaacgcaggataacaaaacactcaagaacatattcggaccgctattacgttatggagctgctgctatttatggatgtaagcatcctcataccgatatacaacgttgaagactacttggcgaaatgcttgagaagcattcctcacaatgatttgaagatggagctcatttgcatcaatgatggatccacagacgaatcgatcagcgttcttaaaaaagctgcccaagacgataaacgtataattgtcatcaataagcaaaacgaaggatacggagccgctctcaaccaggggatacaacaagccaaaggacgctatatagggattatagaaccagatgattatcttgacggcgacatgttctctgctctttttagctatgcacaggcactcgatttccctgatattgtcaaatctgcatactggagcgttgacgaaaccgatgactccaatagaaagctctgtggattctacgggcgcattcaagtttcgcaacacgtctttcgtatcgaagacgaacctcttcttttgcggtatcacccgtctatctggtctgcaatttacaaaaaggaatttcttgatgctcaagatattcactttaagcaggttcctggcgctggatgggtcgataatccgttcctgatagaaaccctatgtcaagcggagactatcgcctataccgacaaggcattctattgttaccgcgaaaaccgaacgggatcctccactgatattatcgctgattttcatattcctcttgatcgatggatcgagtcgactaaggctctcaagcgcataggagtcgacaacaagcgaatctgggatattcacgcttatcgctgtatctataatcttaatgtcgcgcgtcatgctcgcaactactccgagaacaaagcagaatggcttatctacgccaagcagatggtaaagcaacttcacccatcaaactttattcgcgctattcgatacctcaagtgagcacaaaaatgagtagcaactagcacgagcgcggtaaaggtgtttcgcctcggcacacggcaagcgattttcatggcactacactttgctctggcggacactgtagcgtccgcctgttagctgccccattactgtataaataagcctgattaagtcatattcaaggggcttggcggcctcggttagtcatatcgcatagccagcctttgcctatcattgacatggccgctggccggatgtgccggatgacccttagcccctgcctctcgcgaaggcccgggggggggtgttgccaccggggatcggccgccgcaattccggctgataggaacctgccgggcgccggatgcgccacggcccagtaatgtggttgccgagatgcggcgaacggcgcggccagccgtacgggaagggtatcaccatggccgagaagaacgcaaccctcgcggacaggcacgaagcctatctagagctcgacgtcggcaagcagtcccattgggcctacgccgtcgactccgcaggaacggttctgctgagcaggcgcgtcgccaacaccgaggccggcctcgacgaggtcatcgccgaatgcccggacgacacgctcgtggtcgtcgaccagcgccgcaacatcggcgcgctcgcgatcaggcgcgcccgcgcggcggggaggcccgtcgcctacctgcccggatcggccgagagcgagcttgcgaagggctttcccggcatagccaaaaccgatgccaaggatgcgcaggtcatcgcccgcgtggcgctcggcatgccgcagacgctgcgcccggtgccggagggcgatcccgcgctcgacggcgctcggataatgtcggcccaggttgcccaagtgcagaaagaccggacggcttgcgcgaacgcgctgcgctcgaggctgctggagtcctgccccgccttcgagcgggcctgcgagatgaccgcgccgtggtgcgccgggatgctctccgagctcggaggtccgtggaacatgctcgacgccgggcgggagaggttctgcgccgcctcgcacaagcacggggcgagccgcgggcagcgggaccgcctctgggacgcgatctccggcgagaggccgcacgagcaggccgtagccgccgagatgcgctacgtcaagcacttcgccgggcgcatagccgccgacaaccaagaggaggcgatgctcgaggaggccatcgccgagtcgctctcgggcaacgccgacttcgccaacctgcagaccataccggggatagggccgaggacggccgcgcagctcgtggtgtccgtagacatatcccagttcgacagccacgacaagctcgccagctactgcgggctcgccccgtccacccagcggtccggaacgtccgtcaactacgacaaggggcaccgcggcggcaacaagccgctgaagaacctgctcgtcttctcatgcaactcgctgggcaggtcgaagagctactacggcgagtacttgagaagatgcctgggcaggggcatgaagcgcagatgcgcgctcaaggccaccgcgcgaaagaggatgaaggtgatatacgccgtcatgcgagacggcacgccgtactccgcgtaagcggtccgaaggatccgcacgccttgggggccgaggcgtcgtttcgtcatgcccgaaaccgatcgctccatggtggaaaaacttccgagccgccacttgacagaatcataggacccccccccaacacgcgcgcaggcccccgggccgacatggtccgggggcctgcaaacaaagaaagcatcctccgcgagcgcgacgccctatcctcccacagcctggcgctgcagtactttcggcgatggcgggcttaacttccgagttcggaatgggatcgggtgatccccgcctccatggtcgcgctcgcgggggatgctcccgcgggcattatagccccgcccggcggctccgcgccaccctggcggtcgcatagcgcagcatcgagtccgatcgcggaacgtggacgtcctgcctgttgtgaagaagagctcgggctattagtagcgctcgcctgaacacgttgccgtgcttgcagctgcgccctatcgaccaggtagtctacctgggcccttaccaaagagaagactcatcttggaga

SEQ ID NO: 81 - DNA, 47015 bp, Gordonibacter urolithinfaciens
  source 1..47015: mol_type = genomic DNA
cgggagctgcgggcgtccgcggcgccgggtctacggccgccgccgcgcgctccgcagcgccggccacggcgtccggcgctgcgtcgtcgggagctgcggcgggcaaggccgcagccggcgtcgggcgcgcggcggcggcgaacgccggcaaggccgccgcggtcggggccggcaaggggctggccgcggccgcggccgccgtcggcgcgccgacggtcgcgctcgcaatggccatgctcgcggcgctcgcgctctgcgggctcgtcctctgcatgtgcggcgctggcgcgtcctcgacccaggcgagggccgtcggcctgtcggaggaggtgcaggcgctgaggccctacgtgtcctactacatgcaccaggagggcaagggggagttcgtcgagctcgcgctggcggtctgccagcatgagagcggcggtgccggctggaagatagccgaccacgacccgttccagtgcgccgagtcgacgggggcgtcccgcccgggattccccgatgccggcactgtcgccgaccccgtgacgggtgcggacggcgacgactggtggtgctcggccagcgtcaagcagggctgcgcgtacctgtccgacaagctgcggctctggggatgcgacgacccttgcgacctcgaggcgttgaagaacgtgctgcagacgtacaactcgggccctggctggcatgcctacgcgctgtccaacggcggcaggtggagcgaggatctggcgcgaagctacggtatcggcacgcccaactaccccttgcgcgtgctggagcattacgaggtgtcctacggagcgtcgggcgacggggcggccgtggccgaatgggtcaaggcgcgcgagaacaagtggctggtgtactcccaggatgcgagcctgcgcgtggatcccgacaggacgggcgccaccgactgctcgggcatgtgcagggcggcctacctagccgtcaccggcatggacataggctggtacaccggcgaccagtcgctcggaggcaaggagatagcctcggggtcgagagggcagggcgtctccgcctcccagctcgagccgggcgacctcgtgttctgcaactttaacgggtacaacccgacatgggatcacgtcgagatgtacgtgggagacgggcagctgatgggcatgggccacgcgcccggcccccattactcgggggatgtatcgagctatgtggcgaacacttacaactggcaggttaggcggtacttatagtgaagatgaagcacgacaacctatggagggcgaaccccgacacggccgaggagatggacgagatcgagcgccggcggaagcgggccatgcgcacggcgatcaccctcctcgccctggccgtcgccgtcaacgtcgccgtcaacgagttctcatgcgtcggcccgtccccttccaagagggacgccgcgcccgccgtccagcaatccgcgccggacgaccgggggggagcggggcaggccggcgccgatgcggacggcgaggagcccgccttgtccttggacatcgcccccgatcaggccgaggcaacgcgggtcgaccaggatgcggtgcgcgccgcgctcggggcgtactgcaaggagaagggcatcgaggcgtctcgcgcgtacgtttcggccgtgctcagcttcccgtcgtcgaccgcctcgtcctacctggaggtggagctgctggattccgacggctcgaaagcggccgacgtaggcgtcgcctactccctggactacggcacgtgcacggtcgtccccttggagtctttgaccggagggtctgagaagcccgagcgcatcgagcgcgggggcgatgctttatgaggcgcgcgccggcgtacgagggtgccgtcgctcccgatcccgtcatcagccatctgtccgcaaccgtagatcgtgcagcccggtggaggcgcgtggtcttccgcacgagtttggcgggagcatgcgtcctgatcgcgatgctcgctatgatgatcctcgcggatacggcctacggcgggtggatcgaggatctgaccggcctgtcgatctccggcatagtcaacaacttcttcaccgccctcggcctcggcgacggcgtggcggcgataatgcagtcggcgtccgacacctggctgtcgcagctcgcgtcctacaagttcgacgtggacgcctcgcgcgtcgccgacgtcatcgccgtcatcaacaaggcggccgcgccggtgggcgagtcgctcatcatggtgttccttttccaaggggtgttcaagaaggtcacggcgaccgacggcagcttcatccatggggaggggctttacgagctcgtgatgatgctggtcaagttcttcttgtacaaaacgctgatcgacctcgcgccgctgctcatatacgggatactcctcgccggcgacggcatatcgaacgccatctcccagtacgccccgggcgggtcggccggcgtgtccttcgaccaggcggcgctgtccgcggccgtcaactccgctctcgggcagaccgccggcgacgcctccggcaacgccggcatagcaggggcgctcggctcctacatcggcagcctgctcctgctctacctcggcgctctcttcttctgggtgatgtcgatgatcgtgtccttcgcgggcgaggccgtgatcctggccaggttcgccgaggcgagcgtgctcacgggattctgtagcattcccgtggcgttccttctcagcgaggagtgggccgaggccggcaggatgtacttcaaagagatcggcagcgcggccatcatgatcgcggtcgtccaggcggtcgtcatcatcacgcccatgatcctcgaaggggtgatcgtgacgtcgggcggcgacatctggcagatcatccggggagggctcatctacacggcgacgctgctggtggtcgtgctcggttcgacgatgacgacgtacaaggtcgtcgggaagatgatgtgacatgaggcatggatcgaagacagccgccgtcgtcgcgctcgccgcggcgctctcccttgccgacgcctcccaggcttgggcatgggggtacggtgcggcgctggggcaggacggcatgactctcgacaggctcgtgagcgaggtgctcaagcccatcgtgcagctcgccgggtacgtcctcaccgcattcggggcgtaccggtacttccagaaccgctcggacgacgggcccgcggcgcgccaggcgctcggcatgctcgcgacgggaggggtcatggtcgccttcacggcctacgacctcggccgtgggagcctgaacggcttcatgcgcgagttcgccgttccgggcctgatcgcgctcggcaccctttggatgatcaacggcttctacgactacttcttccactcggacgacgcagtggccgcgaagaagggcctgcaggccgccgtgtcgggcggcgtcatggcgcttatgggcggggctttcggaaccatctcgttggtgtactagatcggaggcggatatgggcgagtgggtcacattggccgacgggtcgaagctgttctgcccgtacccgttggagcagcggccgctgcgggaagaggagtccgaagagccgaactcgcagagctggcacgtcgcgctcgcgctcgccagcgtcctggggttcaccggggcgcacaggttctatacgggcaagatcgctacggcaatcgtatggctgctgacgggaggcctgctcgggctcggcgcgctcgcggacgtggccgccatcgcggcctcgcgctggaaggccgcggacgggacgccgctgcgccgcagggcggccaaggggagcctcgccgccgcggggatggccgtcggctgggccttcgtcgcatggatgacgaccgcggcggcggtcgcgttgacggcgctcacggtcgcgttgatggcggcttgagaaccaaggtattggaaaactggaaaacttgaatagtcgagtttttgaaaaaagggagaaagacatggccgagcactacacaaaggcatcgataggtgagataatggcaccgtgcccgagcgcgagccatctcccaaatccaggcggcgcgcgggcggcgagaagcgacacgggaccgaaatcccggattcacaacggaataaggatcgagcgatgagcgcgcagggcggcgcaacgggatccgtgcacgtgaacgtgttcggcgggcccggctccggcaagtcgacgatggcgtacgccgtcgcggcggagctcaaggcgcgcggctacacggccgagtgcgtcggcgaggtggtcaaggactgcatctacgacgctgcgcgcggcgaccaggaggcggcgcgcctgctggacggcagcgtggagagccaggaggagctgtaccgccggcagtcggcgcgcgagcgccggctcgacgggctcgtgcagttcgtcgtggcggactcgccggccatcatgggcctcgcctacctcgcccccgacgccgacgaggacagggcggcgaggctggcggccctcgcgcaggacgagttcgaggcacaggagtcggtcaacgtgatcgtcgccagggagggggcgtacgacccccgcgcccggatacacgccgaggacgaggccgagaggatcgacgcggacgtcctggcccttgtcgagagggccacggcggggcggtacgagacggtgggccgcggcgacgcgggcaaggttgcggagatggccgtcgagcacggcttggcagagaggaccggagatgatgaactacgacgagctttacagggagctggagcgggacgccagggaggcgggcctggagaaggagcacctggagtggcagctaggcctcgaaggctgggcgaaggatcccgtggcggtggcgatgcgcgactggcgcctgcagcacgcgccggagacgctggagggcaagagcgaggagcaggtcggcagggagatggccatggttcacctgctggcggagtcgcgcaggacggccgccgcgcaggcgtggatgcggtccccgcagagctcccaggcaaaagacgcgcagcagaaggcggcgctgatgaacgccgccgcggcggcggagaacgaggccatgatctcggagataccggacatagcgataagcctgtagcggcgcggcgccggccctccaggcgcggcaggaaggtgatggagggccagatgtcgctcgacctgctgttcgagccgtcggacgccgcccccgtgttcgagccggcgtcgccggccccctcgcccgagcgggcggcgcacgccgcatcgccggagaagggcacggcggccacggagccgtcccgccgtcccatcggggacgcctcgccggctccttcccgcacgaggatcgcgcggaacatcgaagcggtcatggtcgcgaaggagctcgagcgcgagggccgcgaggcgacgcccgaggaggcggccaggatgctctcgttcgtcgggtggggcggcctcgccgaggtgttcgacgagacgtcggacgcctacgcggccgagcgcgagaggctcaaggccggcctcacggagagggagtacgccaaggcgcgcgagtccacgctcaccgcttactacaccccgatcgaggtggcccgcgcggtgtgggactacctcgccatggccgggttctccgccggcaacgtgctcgacccggccgccgggacgggccggttcgccgacgcgatgccggagggcatggccggcctcgccagcatcaccatggtggagcccgacccggtgtccgccctgatagcgcagcacgcgcaccccggcatggccgtccagtgcaagggctacgaggcgacgacgctggccgacgactcgttcgacgtcgccgtcaccaacgtccccttcggccagttctcggtctacgaccgccgccatgccggcgaggggatgctcgtccacgattacttcttcgccaagtcgctcgaccacgtgcgccccggcggcctcgtcgcgttcatcaccgcctcgggaacgctcgataagaagtcgagctccgcgaggcgcgagctggcggccagggccgagctggtctgcgcggcgaggctgcccgacagcacgttcagggcgtcggcggggacgaccgtgacgagcgacgtcgtcgtgctgaggaagaggcacgagaggatctccaatgaggaggccgccggcctcccatgggtcggtacggtggagcattcggacggcgtgcgggtgaaccgctggatcgcggagcaccgggaggccgtgctcggcgagctcgaggtcgtgtccggcccctacggcccgcagctcgcctgcaagggcgactgggccgaggcggccgcctccctcgcggggaggctcatggaactcgcgtccggttcctacgaggagcgcccgctgcccgccgcgcgcggcggcgcggccgccgccgacttgatcgaggccgacccgtccgtgccggacggctgctacggcgtcgtcgacggcgcgctgtggtaccgcgagggcgacaccatgcgcctctacggcgggcccaaatcgcaggaagcgcggatccgcgccttggcggggctgagggatcttggcagggagtacctggccctgcagtcggccggggccgacgacgagcccatcgagtcggcgcgcacggccttcaaggcggcctacgagcggctcgtggagaagcacggccggctcaacgacaagcccaatgtcattgcgatgcggggcgacgcctacgcgccgctgctgtcgtcgtgggaggatcccgtcgacggggagtgggagccggccgccctgttcgatcggcgcaccgtccgcccggtgccgaagcggcgcacggcggccgacgccgccgaggcgctcgccatgtccctcaacgcggtcggccgcgtcgacatgggctacatggagtccgtatccgggctcgcgcccgaggccatccgcgccggcctctccggccgcgtgtactacgacccggccctgtcggccttggtgacggcggaggagtacctttcgggcaacgtccgggtcaagctcgacgaggcgaggctctaccggggggacgaggacatggaggcgaacgtcaaggcgctcgagtcggccctgccgcccgacgtcccggccgaggagatctccctcgagctgggggcgacgtgggtaccggcggcggtgtacgagcagttcgcctacgaggtgttccagctgcccaggagccacagggtggagggctcccgcgaccagatctcggtcgcgtactcgcccgagctgtcccagtggcgcatatcgaacaagggcaaggtgtacggcgccaaggtcgaccgggtgtacggcacccgcgcgcgcaacgccctcgacctcatggaggcgtcccttaacctgcgcgacgcggtggtcaacaggacgatgtacgacccggccgcgcggaagaccgtgtccgtcgtcgacagggaggccaccatcgccgcccagtcgaagcaggacgccatcgcctcgaggttccgtgactgggtatgggaggacggcgcgcgacgagcggccctggtcgccgagtacaaccgccgcttcaactcccttgtgccgaggcagttcgacggctcgctgctgtcgttcgaggggatggcggccgacatagagctggcgaagcaccagaaggacggggccgcgaggatcgtgttcggcgggaactccctgctctggtactgcgtcggcgcgggcaagacctacaccatggccgccgcatcccaggagctcaagaggatggggcttgcctcaaagccgctgttctctgtgccgaagcacctggtagggcagtggggcatcgagttcatgcggctctacccgcaggcgtcgatcctcgtggccaccgacgccgacttcgagaaggacaaccgcaagcgcttcgtggcgcgcatcgcggcgggcgactgggacgcggtcatcgtgtccgagacgcagctcgccaagatcccgttgccgcccgagctggaggcccgctacatcgaggaggaaaagatcaggatcgaggacgccatcgaccaggcgaggatgtctgacgacgccgcgaagaggctcaccgtcaagcagctcgaggggcgccggaagcgcctcgagacgcgtctcgagaagacgcgtaagcacgaccaggacgacatgctcgacttcaccgacctgggcatcgaccgcatcttcgtcgacgaggcccaccactataagaacctgttcacggagacgaagatgcgaaacgtggccggcctgcaggccggcgacagccagcgcgcgtccgacatgctctacaagacgcgctggatcaacgagcggacgggctacaagggggtcgtgttcgcgacggggacggccgtgtccaacagcatgaccgaggtctacaacatgcagcgctacctgcagccgcagacgctcgcgctcgccgggctgaacggcttcgacgcatgggcgtcgatgttcgctcggaagaccacctcgctcgagctcaagccggagggctccggcttccaggtaaagaccaggttctcgtcgttcaccaacttgcccgagctcatcacgatgttcgcctccgtttgcgacgtcaagaccgccgccgacatagcgctgccgggcatcccggaggcgcggcgcgagaacgtggcgctggagccgtcgcctgagcaggtgcgcatggtggcggagctcggcaggcgggccgacgcgatcaggtcgggatccgtcgacccggcgagcgacaacatgctcgtcgtgaccaacgacggtcgaaagctcgccctcgaccagaggctcgtgatccccgacctgccggacggggactggtcgaagacctccgcggccgcgcagaagatctggggcatatggagggacagcgaaccggcgcgcggcgtccagatcgtgttctgcgacctgagcaccccgaagcccgagggcttcaacgtgtacgacgacctgcggggcaagctggtcgacatgggcatacccgcgggggagatagcctatgttcacgacgccaagacggaaaaggccaaggcccgtctcttcgaggccgcgcgctccggcgaggtgagggtgctcatgggcagcacccagaagctgggcgaggggactaacgtccagacgaggctcgtggccctccaccacctcgactgcccgtggcggccgtccgacctcgagcagcgggaggggcgcatactgcgccagggcaaccggaacaaggaggtcggcatctaccggtacgtcacgaaggggacgttcgacagctacatgtaccagaccgtcgagcacaagcagcggttcataggccaggtgttcggcggatccggcgcagcatcccgcagcgccgatgacatcgaccaggcggcgctctcctacgcggaggtcaaggcgctctgcgccggggacccggacgtgaaagagcgcctagagttgcagaacgagctgccccgcctggccagccttgagcgggcccacaggagggaccaggcggagctccggcggctgcgcgacgaggtgtgccccgcgaagatagcctcggccgaggaggcgatcgagaggctcgggggcgacgccgccacggtgaaggcgcgcaagggccccgagggcggcttccccggcatgaccgtgatgggggcgtactgcgagaagaggacggacgcggccgatgcgctgagggctgcgctcgtggcatgcgcagagtcgtacggcgaggcccaggtggtcggctcgatcatggggctggacgtgacggcgacgttccaggcgggcacgggctgcttccgcgtcggcgtcggacacgcgcctgccatgaccttcgagggggcggacagcgggatcggggcggtcacgaggatcgagcgagaggcgaggaacatggagcgctacgccgcgtccgcggccgaaaggctcgagcgggcccaggcggagcttgccgccgcgagggagggcgtcgggaagcccttcccgcagcagcggcgcctgctggaggtaaagcagcgcctcgccgagctggacgccaagatcggcgagaagggacacgatccctccctggccgccgtggcggaggcgagcgagataggaggcgaccagctctcgctcgaggactccgggctcgtgctgttcgaccgggcggagctgatcatggttaacagggggatagacaggggctgggacgtctcggtctacgcctacgaggggctcgacgcttccgccatggagacggcgtcctacttcgccacgcccgtcatgggggtcggcgcggaggacaagggcttgagatgggacgggatggcgaaggccgtcgaggcgggggaggccgcctacggggcggaggacgtcaggggagcggtgcgcgaggccgtcgagctcatcgccaagtgctcggacgggctgtcctcgtcggaccaatgccagctcgtagagctggccggatccgtcgcgctgcgcggcgggcggccgctagccctggtcaagtcgctggcggccgaccgggacgccagcgagggccagcccaacggcatcgggttctacgggctcgtgcgaaacgtccgcgacgctgcgctggcgtccatcgacgccggcggggacttcgtggccgtggggaaggacgtctcgagggccatactgggcgcgagcatgccgtcggcgagggccgcctggagcatcgcgtccgacatcgccacgcgcacggccgcatcggccgcggagaaggggctccggtgccctgccaggcacatgctggcgagcggggccgaaggggccgcccgcgccgccgccccgtccaggggggcggggagatgacggcgtggtcgcgagcgggctcgtcctacgtgtgcgagtgccgcccgggttacgaggcggtcgtcgagctgtcgggcgcgtgcgcgtacgccgcgccctggggcacggtcgagcgggcggaaggggccgtgctcaccgtcgtggagcaggcgaccggcctcgccgtagccaagcggctgaggatagcgggggcgacgtcacctggcgacgtcgacgacgtcgccaggagggtgtccgatgcgcgcatcggcgaggaggcggccaaggccgaggatctcgcgaccaggggatggcacctcgacgggcccgccggcatcctctcggtggccgcgcggggatcgcgcgccgcagcggagcacccgctgtcgctcggccgcctgggcggcgcgccggggggcgcgccctgcttcgccgtcgcctcggccggcggggacggctacgcggcgtcctggctcccggacggcgccctcggctcggccgccgtggaatcgggcccctgcccgacgccgtcagaggcgctcgcgcgcctcgccgaacggctcgtcgatcagggaatgccggcggcgggcggcgaggacgacgacctcgcacgctacgagaggctctacgccggcgacatggaaacctataagagcacgaacctggacgagctcataagggcgtgccgtgcatcggcgcgctacggggctgccgagaagggaggcggtgggcgatgacgtccttgccgacgacggtggccgacgccacggcagaggccgagcgggtcatagaggagtgccgggaggccggcgatgaatcccgcctgctgtcctgcatcgcggcgacggcaacgtacgatcccggcacgcgccgggtgaggacttacgggcccctcaacgccgccctggcgtgggcccacggcgcgggatccggctggtgccgtccggccgaggactgggagagggacggccgcgccgtcgccagggccgacatggccgtccccgtcctcgtgaggggcgcctccgggatggccctcatgcgacgctacccgtacgaggcgaccgagggcgacggggcggtgacggagcccgtatgcggcctctcgtgcgacaggcgggccgtcgaggacatcctgtcgtcgggcgagatagactgcgccggcgcgtacggcatggtcgaggcgtacttcggcatgggggacgtcgtcgcccctgcgggcgggggtttgggccaggaagggatgaaggaagtcatcgcgagcttcaaggcggccgcctcggcggtgcatcgggcctacgaggggaggggaggctcgtaccggccgaggcgcatcgagcccgcaaggcccctgcccgtcccggccgaggttctcgcaccgtcggaggtgctggacggcgagggcgtgctggacgcaggctgggatgggtacgtgcgcgtcgtgaagcccttgatcaacctgctggccgccagctacgcgaaagggggctacgacgcggggtgcgccctcgagtgcttccgcgccgctgcagccgagatcaagggaggggcgtctgcggaggacgcgtgcgcgctgatgcggcggtacctgccggagcttgccgaggactgccagctcgaggcggagatagcgagagcgacggagggattgagatgacggtcgacgggctttactgggatgaggccggcagggcggatgtcgggatgatcgagcctggcgacacggtctactgcatatgccgcggcgccgatggcttgttttccgtctcgagcggcgtatgcgtggatccgccggtcaggttcatcgacttcggcgacggcgcgcagttcctcggcgtcgcctcgacggtcgagccgtcggctctgcgcaggttcgggctcgtcggttccgtgttcgtctcgaggcgcgcggccgatcgccgcgcagccgagctgaacgcggcacgggaaggagaaagatgagaagaggcatcgcagccgacgcgccgctttccgacgccggcgaggaaaggctgtcggaagaggatcggagggcgctcaagatgatcgaggagctcttccccggagaataccgcgctgcgaagcgcgaggtggcggcagccatcgcgtctgacgcgccgtcgagcttgggcgggctcgcggcgatcctgtcgcaacgggggaatcccgacggcgcggtgctggcagggaggatcgtcgaggcgctgctcaccgacaaggcgacgctgatggacgcggcgagcatgctgtacttcagcgacggcaaggtggtcgacgtatggtgacggtgcggcgcgaaaacacaacatgcgatattcgcggaatcggcgcgtatggtatcattgtcgctcaggaaaggaaccaggtgatggattccggcgggacgccgggaacgaaccccaaaaaagaaagaaaccgcagacggcggtttcgtgatattggaagagctctttgtcgttgctctattatcgctgaccgggagaggtgtgtcaacccctcggtttgctgcgttgcaggcaaccgcatcggctcgcagccgtcacgattccgcgccggacgaccagaaggcgcaatggaacacaaccgcagcaccactaccttcatcttcaaagcaagcagccaccacgggctctcgaccccgtggtggctgcttgctgccttttccggcatgcgccggccatgggcaaaaagcccggtctgcgcaatccggaaccgcgtggccaaccaggatgcgcgtcgatcgaggatctcggccgaccgtccagattggacaacatggcggtattgcggcaaaaggaagctgaaaggaggtgatgcggcagggggagcgacggcttaggaaaacaacgaggccccggttcgcccccgaggcccctgcggtttccgaaaactcgaaaaccaaagacttttgatagaggtggattgtaccacccttgggtagttatatgcaaatctgccccggaaagccctcatatcgccccatacgacggcgtacggggccggttttcgagagttgccgaacccgtgccgccagggcatggaacgaccgatacgggacatacagcagcacatagattacgtcggcacgcttgccgaagaagaacccgatcccaagacccgctggcagctgcagaagcgcgttgcggcgagcgtctggcagagggacgccaaggcgtactacgaggagcagggcgcggaattctttgatttcgggcaatggcagctcgaccaggcctacgcgagctacctctaccacgagtccatcaagcgataccgcaagcggcagggcgacaggcagatcctcgcgcgcctcgacgagctgaacaacgtcccgcgcgaggacggcgggtacaaggtcacgggcgcgcgccgcaaggtcatccgcgcgatcgtggggctcgccacgtcgagcggcgtgctctactgcagctacgacggcctggcgcgtgcggcgcgcgtatcgccgaggtcggcgcactcgatccgcgcggagctcgagcgcctgggcgtcctcaagcgcgtccgcacggggggcagggccgaggacggatcgcgtcaatcgaacaagtacatcgtgaagtgggacaagctgcgcgacatcctcgggatcgcgtgctgctatgcgtccaattggcatggagagctccagagaacagttgagcgcaagcccttccataacgtgtactacaactacgagggatacgcgcactacagcaagtcggcgcgccagaagcgccgcgagcgccagcgcgctcgcgagcatgcggcgctcgcggcgcaagcgccgaaagtggataaccatgtggagaaaagcgcaccagaaaaaaggacgaaggccatggggcttgaaaacgaagctagtgatcagggtttttgcgcactaaccgatcttaaagagcgtaaaacatctaaaatccttcaacctgtgagatctctcctgtcctattgccgccgcattgtggaaaagcgtacgccgctccgcggctcctcggacgcccgccacgagggcgggatgccggaatcgctgcgcgataccttggacaaccgccctgcgggcggcacaacctggtgcttcgacgtctcaaagctctcccaaacatccctacaaagactcggccgagtggcaccgggaaggatcgtacccctcttggccgagatcgaccagatgacgcgcagcaacccttcgctcgaaacaccggaggacatgcaatggcacgccgaggagctcctgcacatcctcgcagatgcggacggcatcccccgatgaccgaaaggcatcggccgcatcggcacggcttcgccgtgcggcagtgaaaaaatgatctgcctcccggtgccggcagtcaaggggaatttgggaatccttgcctgccctctgtcttaccgaccgaacggatcccaaccgcccggcggctcgacgcacctcgcctggctataacgttgtggatggcggcctcgatgttcgatgccgcgtcgcccccgagcccagcaatcaagagcgccgagcgttcggcgatcgcctctatcaggagcccgctgtcgtttcgatcagcgctgcaggcggggctcgcgcctttctccggtcgaggcggccggatcgccccggatctcgcctgcagggccatcctgcctatctccctatgcaggatcgattccactacgtagacgtcggcctcgtctccgtacggcgcgaagagatcgtcggccgcctcgacgatccggttgagggaatctgggatatgacctgcgcttagattcaattcgccaacccgctactgctcgcttttcattgtgtcttcggaccgccctcgccgcgcagcttcgccctcgcggcgtcgctgtaaggattgctcatgtgatggaggttcttcggcacgctgatgtagaccccctcgccgatgctcgcgatctcatcgtccggcacgaagccgagcacgtctgccacgtcgcatccttcgacgccgagcgctcggagcgccttgatgagggcgtcgatcgtagtccccctgtaggcgaccaccttccccgttttcaacctggatacgttgacgttcgttatcccggtcgcagctgctatcttgtcgagggatatgccgtgctgcagcatcagcgcctcgagcttcacgactatggccatgggctgttatccatggcaggccttgcggatcctgggtccacgagtcgctcctttcgcgactatttcatttccttgctgagtgctaaacattatatattgaataaatcattgcatataacaaatgagaatgggggaatggatgacgtagagcttaacaagcgaaggaagcgacttgggaatgccgtccgcgtcgagcgggtggagcagcggctatcccaagaacgcctgggccggatggtcggcaccaaccagacctacatcagcctgctcgaggcaggcgagataaacgtgacgttcaacaagctgtgtcgcatcgcggaggccttggaggtagaggtgtccgacctggtgcgctagagtgccccggcgttgccgggcacgatctcctctacgtaccatcggccgtcgtcgctatgccaaaggtgctttgtccttccgcagatctcaacggtatagcggatcccgtggccgccgaccttcatgctcgccgcgcgcctcgattcgagcacgcgatccacgacaaagcatcgtccgtctccccagtagatcgccagcggtcgctggcggccgtcggggtcgatgtccaccacggcctccacgtaggtcttcttgcggctctcgattccatgcatttagcagctcctcacgagtggaagaagctgacggggtggacggtgttgtcggccttggcgtcgacgctggccgcgccttcgtcgacgagctgcgcgccccatacgacgcacttgttgccgtagcgacggcgcaggtcgtcgacggaggcgtcgagctcgcgcatctcggtgcggcggggaagcgggtcgaagagcgacgcctgcaggtcggcgtcggcaggctcgaggtcggaggcgcgcacgtggatcccgcgcaggggatggctcgcgtctagcggctcaagctcgcgtaggaggccccaagcggcgcgcgctacctcgagcgtcacgtcggtggccaccggcagcttgcactggcgcgatcgggtgcagaggtcgtccgcggcccttgcgccgaccgacacggtgcgggccctggcgcggccctcgcgcatgcgctgggcgacgctctcggcgagcatccagacgtacgccttggcggactgcgggtcgcatatgtccctgggggccgtgagcccgttgccgtagctcttgatctcgcgcatgacgtcggcggcgtcccggtcgtagggcttgacctcggtagcgtcctgcccgcgcgcgaagccgcgcagcacgaaccccatcttgccgagcctgttgcgcaacagctcgtccgaggcgcacgcgagctggcctatcgtgtcgatgcccgaggagtgcagcttgcgctccgtggcgggccctacgtagagcaggtcgcgcacaggggcctgccatacgacctcgcggtagttctcccgcgttatcaccgtgacggcatcgggcttcttgtagtcgctgccgaacttggcgaagatcttgttccacgacaccccgaccgacacgctgatgccgagctcggcgaccatgcgctcgcttacctcgcgggctatctcggcgggggagagcccgaggcaccggcgggtgcccgtgacgtcgagccaagcctcgtcgggtccgaagggctctacacggtcggtgtaatcgtagtagatctccctggctcgccgcgacacgtccatgtagagccggtagtcagggggcacgacgacgaggccggggcatgccttccgcgcctcccacagcgccatcgcggtcttgacgccggcgcgcttggctatgaggttcttcgcgagcacgatgccgtggcgcgcctcctcgtcgccgcccaccacgacgggcttgccgcgcagctcgggccgtgcctggcactcgatctgcgcgtagcagcagtttatgtcgctgtgcaggacgtcgcggtctggcatgatgacctgttacctccgtaatagagaacaaatgtttgatacaattgtaggcccgcatgggtgccggaggcaatcgaacagtttgtggagtgtttgggatcctagccgctccggctctcgttgaggcgctttcggatgccgtcgtggatcgggttgctcatacagtggagctctttcggcaagctgacgtagacgcctcttgcgatcgtgtccaattcatcgttcggtacgtagccgatcgcatcagcccttggagtggaaatatgggagctgttcgcacctgcagatgttgtcgatgaggtaagaaaggggaggggccggtagggtatcgcttcctcgtcgtgcggtcagtaggcctcctcgcgctcgcagggaaggtcgagccacactccgtagtagcgctccttcaccgtgtccacgtactcgccgtcgtactctatcgtcaccaagcgcacgttgttcattcccacgtatccacgaaccttggtcttggcatcgcgctccggagtcccatggtaaaactcgcggttcgtcatctttccgggcattccgatcccctcttccgatgagtgcattttctgtcatgtaatatgatcggagcatgtagtatcatttttaaatatggcatcattttgaagaacagagcctttggtcgagcccctgcgctccccgtgttcccatagtctcggcttcccagactgacggcatgtcggatacgcgcaccgtcgccatcctgccgctctccccagggcgcagattcagaaaaccgtggagatcgagcggtatcttgatcaacgcagattctcgttcgtcatcgattttcttgctcatgcacctgggcgatatgtgtgcgcaaggaagggtagtcgtccagatttccaggatctctccttccacgggtgtgcaagtatcgcgcggccgtgaggaagaatgaggccgtggaaaagacggatccgactgcgaacacgagcaataggagcagcatgtgaggaaacaaaggaagactccatccgctgttggcgacgagcatgtagccgatggcgatcgtccccatccagaatacgaaggcgctcatcgatgcctcgaccaattctttcttcacaggtgcttgccctctcctcgtcattctttccattcccatgtctcctatctaccgccatgccacgcatgatcgtaatggcgtcccgcttcaagtgtcagcgcacgtgcacgagcagcggacacagcggcttcatgcctttcttcttgcggcctgcgttcaagcgctcggcctcttcaaccgccttcttgatcgaattgagcctgcggaaatacgttgtgcgcttcaagccgagttgccgcatcccttcttctaccgaatggttctgctgccatgcaaggtactcggcgcaggtagtctcattattaaatatggaatcatgtgggagcaccacgcccttgctcggacggcctgcgcgccgcgtcctcatggtttccgcgtcctggacgtccggcatgtcggacacgtgcaccgtcgccgtcttgccgctcgatgaaactgcgcaatcgaccttgattcccagctcgcgggcaatggacatgaagtgatcgaattcctctcgcctgaacccgcttgcagtaaacgtgcattcggttggatgcatatccaaacgctccgatctcgcaattaattatgggactagcatacgcgattagagttcgaatttcaatattaaaattgggacggccgtgcgaaattgataacacatattatgtaaacttaggctaactttttacgcgcagcggccttcgccggccttccctccgcgttaaagaacgtgaatccggctgaggtagtcggatatcatcttcccttcgccgcttcgctcgcaagagagtatctcctgcccgtcctcgtagagggcagagtaaagggttcccccggcgttggcgaacctgtggagcgcggcgcacttgccctcggcggcgcgggaagccggcatgatcgttccgacgaactcatgggggctgtcgtcgccgaatcccgcagacagccaggtctgggttttatcggcgcgcatttctcggacatctttgaagtcgctgctttcttctgacgtttcgtagccggcttcgccgatcatgggccctcctcttcctatgtgctgtcgtgatcgataataccagcaattcgaaacgaattaataccttgaagatagctaatttggtacaatcgtgaaaagaccgggcctgaaatgttggaggatcgatggcgaaggctgtgcccctgtccgagttccgcgtgaattcggcaaggatactcgaatggctctccgaaacgagggggttcgcgtacctgaccaagaacggctactcggtggctgtcgtggcggacgtggaggagttcgagcgcatgtacggctacgccatcgaccatggctacaaggcaggtcgggatgagcaaagcgagtgatttggggtactgggtcaaggatcacggcggcgtggttttcgcggccatcatggtcgtcgccctcgtggcgatgttcgtggccgccatcgttgtatcctcgcaacagcccgaagcggagcccgaggacacggtgagcggagggtacgtgggatcctggtaccatgtcgagtacgacaaggcgtacgtgctcacccttaacggcgacggcacggcgcgctactacgacaagaccctggtgcagcctttgatgttcggaaaatgggaggtaggcgagaacatgaaggtctcgttcttcgagccggaaggcgagcagcccaacgcgagcgccggcgaggagttcgcgttctacacgacgcctaacgaggacggatccatcccgtcctcgcccgctaccctgtcctacaagggatcctactcgtcgtcccagatatggctgttctggcccagcaaggcggctgcggaggcggaatgggccgagcgcaacccgaacaaggcggcggtatcgtgaacgtcgcggtgatgacgggggctttggggtacagggagtacaacaccaccctcatgaccatggacgggtggacggactcgaggggcacggacaggcacccgaccgtggttgacgagagggtcaacgtcggatccttcatgtccggcgacgaccatctgtacgcggacgtctactgccatgacgacgaggtcgagaggatcggcgcgaaccccgacccgaaacccgagcgcgagcccgagttcctcgtcaggaagaagctgctcgacaagcggtacctcggcggcctgctctacctgaaggtcggggagctcgtcgtcgtcgacaggctgaaggacgtgctgccgatggaggccccgcaagggggcggcgaggtagaggacgccgaggtcgacctttattgggacgaggccgccgaggccgaggacgccgaggtctgacgtccctaccgcgacgcgcccctcccttccttggccgccacgttcgccgcgatgttccggctcttcgcggactggtaggcggcctgcttggccctcgacgccgccgcgctcctcgagacggccttcttgcgcgcctcttcgaggtgccttgcgtggatctcggctgcgaggcgcgagcgctggccgcgggattcctgcccctgcggcttgggcctgaccgcctcgccgcccgccgccttgcgggccggcggctccaggcccgcgactgcatatgccgcgtcccgcgcgccggagacgcggcttaggttcctcgccgcgtcgaagtaggccgcctcggccgccccaatggagcgctccatcccctcggccttggaaaggacgtccgcgacgctctcgcccctggactcggcgatgccctcgagggccctctcggcgatcgttccggcctggaccgcgcttgcgtcctcgtacgtccaggccgcctcgctcttgccgccgacgacgccgcgcatggcctcgaccgcttccgcgtatcgtgcgacgtcgcgcgcccacgatccttcgacgagggcgtcctgcagggccgtctccctcgacgacatgatccgctcggcggcgagcaccgcggcgcgccatccttccgtgcggtcgatgccgttgctgcgcgctatggcggcgatgctctctatgttggccacgccgagctggcggccctgcctcagcagcgactcggaatacgacagcaccgcttcgtcgcctatgcgcttgcgcgcggacgcgaggtctataacggcttgggcgtacatgacgctctttatctcgcaccggatccgggcggcggccggatcctggttcctggcggcttcttcgagctgcaggttgagatgcgagagggtgcgggagtacgattcgccgtcgactatcccgtagatctccttgaccttggccgcgcgctcgagcgacttgatgttgtcgaggtgctgccagcgggatcccgcctcctcgtgccatacgagcctctcggtgccgagacggcactcgaccttcccccgcctcctcacgagggagacgtcgtacgtcgccggcgtggcgtcgacgtcggggagggatacggactcggacgagttccgcttgatggcctcccctaccgcgacgatgccgaagttcaggccgagcttctgctccttggccttgcgcccgttggagtcgcagtacgtcagcgtccctctcctggttatggtcacgctcacgcccttgtcggcgagggccgccttgaactggtcccagctgctggccgtcctgcacgccttggcgacggccttcctgatggactccttgtaaggcacgaaccccttggcgagcatcgcgcactcctccttcgtcctgcagatgcgcatcgtcttcaagggatcttccctggcgtcggacgtcctcattttcggcaacggcgccaggctgtacttctcggcgagctcctgcgcgacgttcgcctggcgggcgaggtcgtctttcgcgaaatgccatttcctgcccgtctgcgtgttgagcgcgttgatgcagatgtgcgcgtggggtattccctgcaggcccttcttcaggcgctcgtggttgtcgtcgtggtagacgatggcggccgtcgctccggggccgaacgccttcaccacccactccttcgcgtacgccctgagcgtgtccagatcgatgccgtcctcggggtctggcgcgagcacgtagtggcggtaggtgacggccttcccctcccttccgcccgtcctcctgtcgcatccggcggcacgcctgaggtcgtccatgtaccgagcccagtcgccctgcgcgctcggagggatcccgacgaagtcctcggcgagggcgcggtcgaactccgcgccgtgcccgtcgtggaggtagccggctatgcccttcgccgccacgcggagcgtgtcggcctcgcttatctcgcccatgcggcgcttgcgcctgtcgtccttcgaccccttgcgcaggtagtccatgacgccggcgcagcccgtgtgaccggttatggtcttgagcatcggcatcgctagcgctcccccgctgcccggtcgagcatcaaggaggcctccatcagccggtcgctccatccctgcagggccttggccgtgggcgctagcgaggctccgatagacgccgcctcgagctcccacgccaccgatttcatcgccctcgaggctgattccagatcggcgtcggcggcaccttggaggccggcggagatgagctcccggacgtaggagccccgcacccttgaggcgtcgggcttccccgccctgcgcgcgtagtcggcgcagtcgcggtcgagcttcgcgctcaggtcggccgagagcctgacgttgaggtagccgccgtcgagcgcttcctgcttcttgtagcctttggatcgcggcaaccggcttccttccttcaatgcgtttcgagcgcagcgagcgagcgttagcgaggggcggcccggccgcccgtcggcgcagccgacccgtgcctgtacggcccggaggcttgcctccggcttacgcgccgcgtgcggcgcgttccagggttcggggcggaagccccgtgcacgttgtaacgcaaaatttattttgtgttacaacgtgcgtctcttgctaacctccctacagagtttaacgtgctgcgcggcctagcgcaagcgcgggttcgggccgatgggcgcgggtggctttgcacaggctttcccatgaagggaccctacgcggatcccgtaatggaggaagggtgtgtgaagccacccggtggatgctcggggcgagcatccaccgggccgagcggagcgccttctggcgcgacgcgaggccgacgtcgcgattttcgggagccggcctcctggcggcgaaacggcggcgcggtcgttgccgcgccgagtgtgggcaggcgctcgcggctgtccacacttccggcgaagccggcattgcaggttggggtttcctcttcctggtttcagggtctttcaacgtcgacaaggctttccataatcgagcggtctttcgattgtggaaaggcgtactcgcctgttcgtgttccagggtttcggattggttggttggcttagtttggagggcggtcgatctcgaagagccccgctgctgcggcccttttgcccggctcttagagagccgggcaaaagggcttcgggccctagcatattggccgcgccgtccgctcagagcggccggcgcggatacccttctttctcgctttggcgtttaggggttcttggtttttggagcaagaaagcgcgccttcccacaattcggtcgccgcaaagagcgcggcgattttttccacaacgccgatcccggcgctacggaattaatccctagcggttccttcgcgcatcggcgttgtggaaaaaacctaatcggccgaattatggaaagccttgtcgacgttgaaagaccctgaaaccaggaagagaaaaaccccgcattgaaggagaggatggccgccccaaaaatgggcgtctaaacgacggagggccatcgcaggccctccgattccgcctttgccgatccaggaagcttgcgagggcgaaaggctatatagaaaggttctcattgcccccgccggagcaatgagaaccaacaagacaccgcaacgttttatcgggatgcgaccgtctcgtacttgtcgaggtattcagccaacgcatcgcggtatatctcggagggctttacgcccctgctcttcgctatgcggttcgctctctgcaccttctcgcacgggtagacaacggtgacgcgcttcttgcccactgcgtcgaggtgggaaccgctgtacacctgtccgtcctcgtgtgggtagtctccgcgctcataagcggcggcgctctcttcgatccattcgttggtcaaaccatacttggccgcaagttcatctacgttcattgatttcacctctccatccttagctctcggagcgtcttggcgctcggcgggatcatcgcgtggtagacaaggaagctgtcgatatcctcatcgtagacataaacgagctcgatgaatcttccttgcgtatcgaaccctacaccgacccactcgccgctctcgcggcgcgtgtagctcaccatccctcgcacggcatcgtaaacgtcttggggttttatctccggatgacgctgctcgattctcgggtgtatgtcgatgtggctcattgccgtcctttctgcatggtatgaataatatcatactatttactctttttccacccgccgcccttgctccaaggatgcgccgctagtgtctcggcccagtagttcatttatcagcagccgttcatcgacgtggtatttagggaggggcatccaccagcaccacgccggacgattgtcttcatcatcacttgggcgagtgctctgaacatgcaacaggatgttagggatcaatttgtagcgtccatgattaaaacgggatgtcttcgtcgtagacggatgctgtagaatcaggcgaaagggacgacgggatggctgcgaattccgcgttggcgtcgtagccgtcggtcttattacggctggacatgaactcgagctcgtcgacgatcacctcgatcttgctgcgcttctggccctcgcgctcccactggctccaacggagcttgccctcgatggacactttggtgcccttgctgaggtaacgcgaaagactttcggcgcgcgcgccgaacatcgtgcagtcgatgaagttcggataatcctcccactcgcccgtctgctggttcttgcgacggtcgttgaccgctacgccgaagccgagcacgggaagcccgctcgcggtggagcgaagctcgggatcgcgcgtaaggttgccgctgatgataactcggttaatgctcatggtcttcttctttcagatttggctgtcttacgagatgcccggtctgttctcatagatgccgaagtacccccttccattcgtgaataataacgcaacaagaaagagtgacggttagtgtccttctaaccgtcactctttcttgttggaaacaggggcgcagggggcgtagcccccgctgaaccgccgtgacggctatgggatgacgtcgagcaccgtgccgagcaccgtgcgcagaccctccccgaacgaggccccgttcgacgccgcggtgaggatcgcgctggccagcaggctgagggcggccacgacgaccagcgccacggcaccccgccctaccgtgtacgctacggattgggccctggctgccatcgtcggcttgggcgcgtcggggtagacgtgccggacaaccacctcccccgatcccgtctgcacgacgttcccccgcgacgccttcagctgcgcgtcgatgcgctgcagatccgcctgccacgcggcggcgtcctcgagcctcttcgccttgacgtcggcgagttccgccaaagccgcgcggagcctttcttccgcgtcctcggccgtaccggccttcgccttcgcggcggcgagcgctgtctcgagctcgctcgaacgcgcccgggcatgctcaagatccttcgccagggactccgagtcgagggcggcctccttggcggcgttctccgcttgcgccgcgcgcttttcggcggcctgcagctcctccgacagcctgtccgcgagcgaagagcggcgcgagagctccgattccgcgtcgtccaggaggccggcgagccgttcccgttccttcaggacgttggcgtacagatcccgctcgtcggagatgttggagatcagctcggacatcccgttgtcgagttgccgtaccctcctctccgctgcctccgtcttgctgcgcgcggtgtagagctcgtcggtaagcgcggacaccttgtcctggagcatggagagcgctcgggctgcttgctcgctttcggagcttgccgacacgaggtcttgctccgcctttgcgcgtctcgcctcgctccgctcgagggcggccctggcctcctccgcctccgtctcggcggctcccttggcgacggcgaaggaggcggcgtcgcgctcgagcgagcccagccgggcgagcgcctcgtctcgcgccgacgccgcctcctccagctgcgcctccgcctcggccctggccgcggtttccactgccacgatgccttcgaggcgggcgcgatcctcccccgcccgctccagcgcctccgtagcggctctgagggcggcctcggattctgcggctcgcttctccgcctgctcgatctgccggtccgcctcccgccggccggcttccgcctcgtccctcgcggcggccgccgcggcgagctccgcctcaagggcgtcggtatgccgtctttgcgccgcagcgtccctctcgagcgcctctgcagccatcctcgcttcggcgacgatagcctccaggcggccgtcggagggcgcttgcggcgcaggtgcaggatcctcctgcagccgagcgggttccggtatcgcggcgggggatcccccgccgtcgaggtactccgtggcggcggccatgttgtcggcgcatgccatctcgctacccggtttcggcttggtgccggcggcgaatatgagcacctggcctacttggtagctctcgccgatgccgccgtagtagaggtcgcggtcggtgatcgtggcgagcacgtggccgcggtatctggatgtcttcacgacgtcacttcccgtactggccgagggactcggggtactcgtccttatgggcggctatccacgcatcgagcgcctcgcgtatgaccagcgagcggttcagcccgtctatgcccttgagccggttgagggccttgttctgatcctcggtgatcatgaagccgtacgtcgtatacgattgctcgccgctctccctcgaggaggcttggcttacctcgccggcgtcggccttcttcggcgttgcgcgcgcggccggtgcccggcgcttgcccgttgacggcttctgcccctcttccccacccttgcgcggcttcgagggagagggggcttccgcccggctcggcgtgacgacctcgggttctggcggtgccggctgggatgcctccttcgcagcggcttcccttgctgcggcgaatcggttcgaggttgccatcagatggctcctttctttctaagatccttcacgaccgcttccagtatcgtatgttcgttggatttgggatgttccaggttgattggcttcgactcgacttcggtgtccttgtaggctacgcggtacgggatgacggtatcaacgagcagaccgcccatgtcttcgcgcgagcggatgtagtcgagcatctcgggtgccagcttgatgcgcttgtcgtagttgcagaccacaagtcccttggtgacgtcggggatgcggagctcggtgcacaattcctcgccccacaagtattggaacatctcgacgccggtgagcccgttgtccgacacgtcggtcacgagcactatcgagtccgcggcgaagaaggcgttttggttaacgaggccgagcccagggttggtgtcgatgatgatgtagtcgtaccggccgaagaactcgctgttgtcctgcaggtagtagccgagcagcctgatccgctcgccttttgccgcgagttcgaattccgttttgaacagcaggatcgaggacggcatcacgtccaggttcggcaggtcgcgcaacggggcgcggatcaccgcgtcctccggcggcgtgccctggttcgtgaggacgtcggcaagggtggtcatgtccgggtcggcaatgtcgatccccaaccccttggaggcgttagcctggggatcggcgtccacgacaagcaccttatagcgctctgcgaggcagccggcgatgttgtcgacgaccatggtctttccagccccgcccttcatggctcccaccgtgacgacccatgcggggttcttctgggacgtcggcgccttggcctttgccattccctgcctccttgattgatagagaactcaaaaacttgaatactagagaacacgagtaaagtatacatcaagaaaaagagtagtcaagaacatgaaaatatgaaaacttgaaaacacaagaactaaaaaacaataaaatatgaaattgtaagaactagaaaattcaagtaatagaaaacttgttaaagcgaggtatagagttcttgaatactcgtgtaattgaggaaacatcccactggcaacgttagtgaagatcacgaatacttgaataatgtagaacacgagtacttgaaaaattgaaaatgagaaaatacaaatacttgaatactagaatatacgaatacttaaatctcataattaaatatgagacttctataccgaaatgctaaacatgtaaatgatgctgcaaataatatttcgcaggttaggccttgaaaaacagccctgggggggggggtatcatggattaatgaaaagcgcatagaaagggtgaacgatggcgacccaggaaaaacccgtctccaaccaactgctgaaaacggctgccgcgctggcctcgatcctgctcgcggcatcgctggcgtcgccgccggccgcggcccttgccgcgggcgacggggacaggatcgtcaaaacgttcacttacatggaagcgtccggcatgccggaagggctcgtgccatcgtctatagagttcggcggcaatgcctacaaactcgaaaagcaaggcgaaccctacgttgatgaatcgtacgagcggcaaaccgccgaactcgagcatgacacgaccgtggaagcgggcgtgctcgatgttagctacgccatcgccagcatgccggccacgatggacgcgtcgacgatcgatccactctacgaaggggatctgccgcttgacagcgtcgagcagatccccgtctaccagctccgcacccgtcaggttgaccggccggtggactatcccgggctgcccaccaacgacgtcgatgcgacgatacccgcgtacgcggacttcaccgtgacaagcggcgatggccccgatacgacgacgaccaagaccctggccctctctgacgtcgagttcgaggtcacggccaccgacgacctagggctccccgtatcgtacacggcccatgccaactaccgcggcaccgaggactacctcgagacgatcgcctacaccgtcataggccattacaaggggatcgcgacggagaaggacaggcgcatggcgctggacgttacctactaccacgaggttcccgagcctgcacccgcacctgagccggagccggagcagccgttcgatgtgatcccctacgtcgtcggagcgggggggacaggtgccgtgctcatcgccgtagcggtggtctggaggcggcgcgcccgcatcaccaagacgtttgacgacggcagcgtggtggtgctcgcgcgggtcaaggctgtgaaaacaggcgacggcgcgtggagcgtccgcgtgcccgacaggctggaacgcgggccgaaggagctgcgcccgacgcagcggatgatgaggttcccctccatcgcgataacccgcgacgggatggttctgcgggagtcggctcccgtgaaggtcatgcagttcgacgacgggggtggggaggcgaagctgcaagaagaatgacgaactaggccccgatgccggggtgcgcatggacagaccgggcggagagccatgcgccccccggcatcggggccgccgatcggagggatacgaaccctgcgctaggcaaacagactgggcataagaccgggcgaaaggatgttgggacatgagcgaaaacgaaaagaccgagaagctggaatatcaaacggaagagaagatcgaagggctgaccgagccgattgagggcgagaaggatatcgagtccgagcctgcgcaaggggaaacggtggacggcgggggttcgcccaagcgcaagcgccgcatcgtcgcagcggccgtcctcggcgttgccgtgatcgcgctgtgcattgcgggcatcgtgggcgctgcaacgccctcggaggcaccccagcccgaaaaatcccagccggagcaagagacggttgcgcctaagaatgaccagaagtattccctcgcggtcaaaatcgaagccgaagggtggactgataccgcgactaaggcgacagtgcgcgtcgaagctgcggccccgcacggagagatggaacctatcgagcgcgaggtcgagtgcggcgagaatatcgtccttgtagaggccgatgagttcgtgaaggacgccacttacaaggtgtccgtgtccaaagcccccgtgcttgaagacggatcaacctacaccgcaggggagcctttcgagcttaaagccccctctgatgctgctgcgagcgcgagcaacaccgtaaggtcgcttggccttgagtgggataacgagcgcgaagacgctatggtcatgttcgagacggtttcagccgatgaaaagaagataatcgtcaacatcactctcgcgccgaaagcgctggccgacatgagtgccgaagaggtcgaggcgtcggcaacagccctcgaagcggcaggcaagtcagacgccgcccaggcggccgtgcagagcgcccctgccacatcgggtaatgctgtgcaaagcggggggaccggaggtggatcgacgtccgggggaggttcctcggaacctgctcccgctcctgctcccgctcctgggcccgaccctgcgccggctcctgctcccgagccggatcctccggcgcatgtccataactggattcccgaaacgacagagaagactatttaccacaatttctgtgggatttgcggcgctgatattcaaggaaacgaagcgggtcatctgaaaaaccatgccctagcaggggaaggcgttggcaacgcctatccgtctcctgtagggacggagactgtgaacactggccgctactactgctcctgtggggagtggaaatagaagaatcgaaggcgaacgagatgggagagggcaatgatagacaacttgctgaaagaaggaggaggcatactgcgtcgcctgccgtccgcagcgatggctatcatgctagcggtgacgctggcgataccacagggattggccttagccgatcctgctcccgtctctgaagatgttgaagccttcgggcatgcaaatagcgaggcacagccggtaatctcggaatctaacacaagtacggagatggcagataagggggatgggctagagcaggaagttacccctgatcaggaaacgcagcctgataacccaaaggaagaaaaccccgtgtcgaaagagccggatgaagattcggaatctataaaaaatgaggcctctgacgttgaagaggaagccgagcagcctgtagatccgcttttgttggccagtcaggctccaccggtcatggggtcgatcgcgcgtgacctatcgaccataagtggcaccgcaagcatggtgtgtctcaaccctgggccgacgaacgaccattacaaccggttcggtataaccatgcccgacggccagtatttgattggccactgcatggactatggacaagcggcgccagccgatggcacttataatttcacaggggtttgggattctggagctcgtgcttacaatgtgacgcttgacacaaccggggcaaataagaatccaggatctttagcgccttatccgtgccagcgggtagggaacttctactggacgccgaaaggatctgttgagctctacaagagctcaactaagcctgatatgacgaacggcaacccggtttacagtctctctggtgcaaaatacgatgtttaccgctcaaacgatgacggttatgtactgacattgacgactaatgcatctggttacgcatcggcctccggcctgccttatggcaactactattgcgttgagtcgcaaccaccaacgggtttctttaaagatactagccgacattacttcgatgtatcaggcaatgctgttattagagcgtctgatgtgccgtacgacgatccggtaggtgcgttgcttcataaggcagacccgttgaccggaggcaccgctcaagggggtggaacgctcggaggagcggaattcaccgtaaaatactatgcgggttactattcttccgatccagctgcacaagggataagccctatgcgcacgtgggttatgcgtacggattctgacggtttctgctattttgactcatcgtatgtggtatccggcgacccgttttatattggcgctgctggcacaccgacgtttcctttaggcactgtgaccgtccaggaaactaaagcgccggagggatacgtgctgtcctctgcggcgcgtccgaacgacgtattcgtgcagcgcattacaatgtcgggtattgaggggaatccggctgaggtctggaatgagcatcaattcctggacgattctatccgcggcggcgtaaagacgacgaagctcgatggctactaccaaagcgcgaccgcgcagggcgatggaacaatgcaaggcgcgaccttcgccatcaaaaatgcatcagagaaccccgtcgtggtcggaggcgtcacatacgagccgggcaaggacgtggccaccatcacctccggcgccgacggcgtggcgcagaccgcgagcgaccttctgccctacggcacctacgagctgcgcgaaaccgtcccgccggagggctacctgctctccgacgaagtatggcgcttcgagatccgcgaggacggcgtggtcgtcgaggctaccaccgagcagtcgatagacaaccaggtgatccgcggcggcgtcaagacggcgaagctcgaccatcagagccaaacgtccgtaccgcagggatccgccagcgtcgaaggggccgttttcgccatcaagagcgtttccgctaatcctgtgctggtggacgggatcgtatacgagccaggcaaggacgtggccaccatcacctccggcgccgacggcgtggcgcagaccgcgagcgaccttctgccctacggcacctacgagctgcgcgaaaccgtcccgccggagggctacctgctctccgacgaagtatggcgcttcgagatccgcgaggacggcaaggttgtggaggcgaccaccgagcaggccatcgacgaccaggtgaaggccgcggagtgcttcatcatcaaggtaggcacgaagataggcgatgacgtcaccgagggcgacaaggccgacgcgatacccttgccgggggtcgagttcagcatctacgcctccaaggacttcgtggataacggcgacggaacctacacggtgcgcgacggagccgcgccctatgccactatcgtaaccgatgagaacggcatagcggacacgtcctacaacccgcgaccggacgatcagcacggcgcgttgccctacgatgactacctggtgatcgagacggggccgaagccgaattacgatcccatagagccgttcacgttctctgcccgcgaggacaagaaggtgtaccacttcttcgccaacaacacgtacgtcactgcgggcgtcgagctcgtcaaggtggacgccgagtcgggcttgcccgtgctggttgcgggaacgcagctgcaggtgctcgatgcgtctaagacccccattgtgtggcacgagacgtatcccgaggcgatcagctacgacactctcacggtcggcgatacgggccgcgtgtacctgcctcagaagctcaacgccggatcctactaccttcgcgaggtgtccgcccccgagggctacctgctcggccatgccgacgtgcccttcacggtgtcaaccacgacggactgggatgatccgcttgtggtcgagtacgccaacatgccccagaagggctctgtaaaggcgatgaaggtggacgccgagacgggcgagcccgtacccgctgccggcatcgagttcgacctcgtcgccgcgtctgacatcaagaccggcgacggcgtggtgcacgtgcccgccggcgagatcgccgcgcacattgtcacggccgccgacggcaccgcaacggccgaagatctgtacttgggcagctaccgcatcgtcgagacgctcgcgcccgacgggtacgtgctcaacggcgagcccgtcgatgtaacgctctcatacgccggccaggaggtcgaagccgcctacgccgagtccgagttcggcgacgtgccccagaagggcatcatcgaggcccacaaagtcgacgccgagtcggggctgcccgtcgcggtgcccggcatcgaattccgcgtgaccgccgccgccgacgtggtgacgcccgacggcaccgtgcgcgcccatgagggcgacgtggtggccgaggtcgtgaccggggatgacggcaaggccgagacgccggagctgtacctgggccgctacgaggtcgaagaaacgctcgcgcccgacgggtacgtgctcaacggcgagcccgtcgatgtaacgctctcatacgccggccaggaggtcgcggtgacgcgggccggggccgtcgtggaggacgcgccccagaagggcgtcatcgaaatcgtcaaaaccgacgaggccgacgggcgcgccgtgccaggcgcggtctacgaggtgacggcagccgcggacatcgtgacccccgacggcacggtgcatgcgagctccggcgacgtggtggccaccgtcaccacgggcgatgacggcaaggccgagacggatgagctgtacctgggcgattacaacgtgcgtgagacggccacgcccgacggctgggccatcgaccacgagacgcacatggtcgagctctcatacgctggccaagaggtaaaggtgacgcgtaccgtgctcgagacggccgacgcgcccaccacgttcatattgctcaagaaggccgagctgatcgacggcgagcttgtcgactatgcaggctcggagtggcacgtgtgggccgaggacgcggcgggcgagatagcgtacgatgccacggccacgaccggcgaggacggcagcttcgtcctcgagcgcatcccccacggcgacgggctcgcctactactgccaggaaaccaagacaggcgatgactacatcctcgacccggaggtttacgaattctccgtcgacgaggagggcctgatcgcaggcgagccggcctacgtgttcttgaacacgaactaccacaagcgcatcatcgaggcccacaaagtcgaccaggacacaggcgagccggttggcaagaccggattcgggctgtaccgctggatcggggagggggagcccgacccgacgttcggcggccgtcagggcttccatggcgtgttcgcggatgatcccgacggcgaggtggacgggagcctgtgggagatggtcgccgaggggacgaccgacgacatgggcgccgtcatcttcgagggcctggagttcggctggtacatgatggtcgaggcggtgccgaaccccgattacgccgagtggtgggagtcggcgggatccacctggggacgctaccttttcaaggccgacaaggacagcgacgtccggcagacgcagacgtacggcaacatggccatatcgctcgaatgcaacgtgagcaaggcgaccatcgaccgcacgagcgcggcgttccagtcggatgagcgcgcacccgttcgcgtcgacaacgtgggcaaggagcgctaccgctacgacgtcgcgttcgacgcgggttccaccaacgtgagggcagaccagtacgcggtcgtcgatccttgcgagttcgtcaacctgggaatcaggctcgacacgctggtgacgcctgcagcctatggcgacaccgacgggttggtcaacgtatggtaccggacgaacatgaccgatacgtcggccgtgtactcgaccgccagcgcgaccgccggcaaccccccgaaccagatggccgacggaaccgaccgcatcggcacggtcgggtggcgcctttggagggagggcgtcgccgccggcgcccgcacgcgcctcgacgtcgacgggctcggcctcgccgccggcgaatacgtcacgggaatcatgctcgaatacgggtcggtcgaggtagggttccgcacgctgcaggacatgagctacctggtgtacgcaacggagcccctggacaacagcaacggcgaggtggtcatccccaacagcgtgacgagccatatcacccgcaactggagagacgggcaggggctgtacgacgacgcgcatgacaacgtgatcacgcgggtcatcgacaccttcggcttcgcatcctcctatcacgggttctcgacgggcacggcaggcaacggtggcgcgctcaccgcgacgggcgaccgcgtcccggccctggagggcgtggccatgctcctcgccgcggtggccgccgtcctgctgggcatctgggccacgaggcgcgaagaaggggagggggcatgaggagggccctggccgagcatgcagaggacatgctccgctacatgctggacaactccgacgacgtgcggaggatcgtcgtcggccggaagaagctcgtgagggacctgcagatgaacccgacaacggtgtccgtcgtcctcggctacctcaaagagctcggcctggtcgaggtgaacggccgctatgcggagaacggcgcgcagttggagaacgggtacacggtgaccgaggcaggatgcgagttcgtcgccgaatcccccaaggctaggaggtagcgaatggcatcggaggaagaggtcgtacggttcatcttcaacggtgcgaacgagatggccgagctgatgtaccagctcatcaagtgggccctcgagcgccgcgagaaggggagggacgacggccggcgcgacccctcgaagatcagcggccgcatagccccggaggacgcggcgagcttcgccgccgacctcgccgcggcgggcataggggccgagtacgtggcgcaggccgacggcggcctcgtctactcgtgcgacgccaagcacttcgagacgctcaaggcgctcaccaagggctacgccgcgaagtacgacgccatgcacccggaatccgttgacaacgtctactacgagacgctgcgggactggcgcggctgctcgctcaacgagtgcttcgaggtggcgtccaccgtggaggtggccgccgtgaacaagatgcgcgccgacctcgcagccatgggggtctacttcgaggtggcccgccgcccggagaacctcggctacgtcgtcaagttcaacgcgaaggacgcgagcatggtggagcgcgccctgtgcgagctcgaccaggcgtacgggcatccccagagcgcccaggacgtcgcgcgcgccgtcgcgggctacctcccgtctcccgccgagggcgtatggaaacgggagggtgcccgctcgacgctcgaggcgaggaacgccggccaggacgaggtgctggccgccgcccacgtgtacccggagaacgggggatggcacgtttacggcgaggcggcgggggagcgcttcggcgacggcgtctacggcaccgagcgcgaggccgtgcaggcgggcgagctgctcgtggagcagagggccgccgagctcggctcgaacgtcgagatcccgcgccagggagctgccgcgcgcgacctcgacgggcgcaaggcgggcgactacacgctgaccatgaccacggtcgagtgggaccgggccgcgaacatcatgggaggcccaatggaggaggacggcatccccttctccctgtccttcgacgaggcggcggaaaccgcttcgctcaccttcgcgtccgagcacgccgccggcgtcaaggccatcgcagaccgctatatcaaatcgtcgaaggagaacctcaaggacttcaccactgcgcgcttcgaggattgggacgagttctgcgaagtcgccgagacggggatggtgagggacgacgccctgcaggcgatcagggcggagtggatcgacgtcggcgatggcaggtacagcctggaggcgtacgcgaacgcatgggacgccgaagccgtcgtcggcgtgtcggtgtacgccaaggccgtcgtggaatccgacccgtccctcgagggatgggaggtatgggggaacgccgacgggcccaatttcggcgagcgcggattcgatgacctcgcagaggccatggagtacgcggagtccctggcggcgggggagctcgccgagaggggctacgaggtcgccgtgggatcgcgtcccgaagcgcccgcacaggagcgcggcgaagccgctcccgagctcgacgccccagcacgccaggagcgaaccgtggagcaggcggactacgtcgtcgagccgcgcgacgtcggcccgtcggaaacggtagagacggtggtcgccgccaccaagtcggcggaagtggccgacgatgcgggcgaggcgcacatcggaagctccttggaggagatgacgaaccctgacgggctcgatctgccgagcatcgagcggttcggctccgccgaaaagctggacggcgcgaagatcggcgacgtcctgcaggcatgctccaaagacgtgaagatgatcaaggcgcagctcgaggccaagcgccagcaaggcgtggaacgcggggcgaaggcggccgtgcaatctaagggcgcggcgcgctgatggccaagaacgggaaaaacggggtgcccgtcgcaacgacggcgcgcaagcgggaggcgagccaggggttcatcgccctcatggccggcatctccttggtcgcgttcgttgcggtcaaccatgtggcgggctacgtcatccccgtcgcctcgtcgcgcgggcccgcggcggcgctcacgagcatcccggtagccctgctcgacttcgtgcggagcccttgggcgctgagcctcgacccggccgccgtggccgtcgggctcgcggggccggcggccgtcgttctcgtgtacctgctcggcggcaagaaggccgacaagccgaccatggcgggcatggagcacggcaccgcgcgctggggcgaggaggacgagaaggacaggcacgccgacacggataacccgctgaacaacataccgctcgcccagggcgtcgagctctgcctcgaccccgatgcgatagggacgcgccggaagggcttcgtggagatcaaccgcaacgtgatgtgcttcggcccgccaggcacgggcaagacgttctatctgttcgtccccgcgctcctgcggttctggcggcccaccgacccgtcgagcatcacgagcgacacgaagggcacgaccgtgaagcggatgctgccgtacctcatgaggcacgaccgcgtggtgaaggttctcaacaccaaggatccgtccaacagccacggctacaacccgctcaagtacacgcgcaacgatttggaggtgctcatcgccgtcgacaccatcatgggcaacaccacaggacgcaagcccgatgagggcgtcgacggggacttctgggagaaatccgagaaatcggtgttcgtgtccatcatcggaggcttgcgcgagctgaaggagatagctccggggctcgacgtcgaggtgaacataccgacgatggcggacatcctgctcaccgccgaggcttcgagcgacgacgaggatccgaacacgcccacgaccatcgaccgtttcttcgcgctgatcgagcatctgaagccggacagctacgcctgccgcacctacaaaggcctgaagctggccggcaagggccggacgatgaactccatcctggtgtcgtgcgcggtcaggctcatgcccttcaacctccccgtcatccgcgagctcatgtggcgcgacgagatggagatcgaccgcatacccttcgagggcaccaacttgtttgtcgtggccgacgatgctggcggccagctcgacttcgtcttggccatgttctaccagcagacgttccgcaccctctacaacatcgccgacaacctgccgggggagaggttcccggtcccggtcgtgtcgttcatcgacgagatgttgaacatgggcaacataccctacaaggagaggatcctcatgaccgcccgctccaggaacatgccgatagtgatgggcctccagagcatggatctcgcgaaggagaaatggggcgagaacatcttgggcgcgatcctcgacgcctgcgacacgatcgtctacatgggcggcggccgctcgaaggagagccgcgcgtacatctcggagtccctgggtacccagacggtctacgagcacacggtgagcgagacggtgagcgcccggatcatgggcagcaacgattccgctcagtcgtcgtaccagtcgctcggccgcccgctgctcgacgaggccgaggtcgacaagataccgcgggagcagtgcatcgtccacttctcgggcgccgcgcccctcatggtgggcaagtaccgcacgcaggacacggacgagtacaaggactcgcccttcgcgcccgaccgaaggggcgaggccgtcacagggcccttccctttgcaggagatgagggagcacaacgcgagggtgcgggcatccgggttataggcaagaaagtgtgtccgttttaggggtgtaagggcaggtcaaaccctcgataaaccatcgtttaaatttcggaggcaggtttaagtgcctggcaagaatgtgtgtccgctttcgacttgacaccgcaggtcagaggccgtaaaccgccctcttaaattccgtggttcaatcacgggatgaagaagatactgtgccctgcgtgcgggggcgacacgaaacgcaacgggaagacctcgtcgggggcgactcgttggcgctgcaaggcatgcggcgcatccaccacgcaacgttacgacaacgagcctaaactgctagagctgttcctgaggtggctgctctcgaaaaagacccaaggcgagttcggcatgcccggacgcaccttccggcatctcacgaataagttctgggacctgtggcccgtggctcctgtctgtgacgaggtccaccacgtggtggaggtggatggcctttggctggggcgcgacgtcgtgattatgatcgcctgcaccgagaagcacgtgatcggctggcatctagcgagaagcgagaacgcgcaggcgtgggcggcgctcatggcgcgcatagcccctcccgacgtcgtgattaccgatggcggaaaggggttcgagaaggcgagacgcgccgtgtggccgaacacacgcgtgcagcgctgcgtcttccatgcgttctgtcaggtgaagcgccagaccacgaccaggccgcggctccaggcgggcgttgagctctatggcatcgccaagaagctcatgcgcataggtagcctcaacgaagctgcggagtggcttgcgggcttctctaattggtgcacggcatgggaaggattcctaaaggaaaaagaggtggttgacgggcggatccgctacaagcacgagaggctgcgcactgcgcgcggcgggcttctgaagctttgtagggccggtaccctattcacctatctcgacgaaggcttgctcgagggaggacctgttccggcgactacgaacaggatcgaaggcggcgtgaacgcccagatccgccacatgctgcgagagcatcggggattgaggctgacgaggcgcgtcaaggcggcgttctggtggtgctatatggaccttgaagcccgtgcaagcccgaaagagatcctgaaggaaatgccgacggacgtcctgattgctgagttttatcgagcagctgccgaagctagcgaaaaagatgaagcggtggggcgctggggcactgctgtgcaatggaatgacctgcatgcaagcggcccttatcgcatggattacgattaggctctggacacactttcttgcctataacccgggcatcccttgccgcttgacgacatggaaaggccccggtccgtctcccacggtccggggccgagaagcgatcacggccgcaacgaggcggctttgaccaaggaaatgatattcgaaaggaacgggacatgaaagaccaaacatcgaaaacggccaagaacagggcatctgcgcttgggaaggcgaaggcggcggcgctgtcgctcttcggggccggcgccgtgtgcctcgcgagcgcgaggcccgcttacgccgtggacgtcaacgggccaagcttcaactacatgatcacccaatacgtggggcccggcatgacggtcatgggcttcgcgatcttggtggtagggggttacaactacttcaactacaaggacgaggaggggccgaaggccaaggcgggcttggccgggatggttggcggcggcatcatggcggccataggcggcggcgccgtcctcatgctctccatgagctgaggccgcaatgtccttcaccgtcccctaccacctcgacccgctcgactacgagcggaaggcattcgggcctttcacgtctcgcgagctcaagtacggcggcatcggcatcgtcctcgccgcagttgtcggcggcgcgctctggttcgcccctttgagcgtgcccgagctcttccgcgtgatgcccgccatcgcggtggcgttccccttcttttacgtggccaacaccaaggccccgcccggctacgagtcgccggaggagtacatgagggagcggctcgcatccgcgttgagcggggaggacgtatacgtgtacggctgcgacgacgaggacgagtacgaggtgatggaagatccgccggcgaagtcgcccagggagaggaaggagtctgccaagcatgagaagaaagagcgagagtacgtccgcggcaaagcgcgaagcgcacgatagggcggatgctgccatgccggacgtcgcgggcctgacggtgaagcaggccgagatggcgctcgccgaggcgcgcaaccgggagcgagagcgccgcgagtacgagcggcgcaaggcgaagggcaagcccctgtcgaagatcacccaggatgcgatccgctacgagaagtgcttcgagagcggcgtcgtgaaggtcgagaaagggctctactcgataacatgcgacgtggacaacatggactaccgcaacctcggcgagagcgagaaggaggcgctgtacgtccggctcctgcgggtctacaacctgttcgagccgacgacgcacctgcagtggtcggtcatcgtgcgcgtcgtcggccgccggtcgatcctcgacgaggtgctcatatcccaccagccggacgggctcgaccgcctgcgcgacgaggtcaacgaggtgctcaccgaccgcgcgtcgaagggcaagacggacatagagacgcgcctgctgctcacgatctgcaccaaggccgacaacgaggccgaggcccagagcatcctcgacggcctggtcaaggacatacgccccgacttcgagtcgatgggatccggcctgacggtgctgagcggcgcggaatggctcgagatagtggccggcgtgttctggccctccgacgtcctcgtgttcgactgggcaacgctcgtcgacaccaagaccggcaaggccacggggctcaccaccaaggacgccgtggccccgatgtccctcgcgttcgagccgcgcatcctcaagccgcgcccgaacggcaccacctcggtcgtcaaggacagcgggatctaccgctgcaacgatttctacgcctcgacgctgctgctgcgcaagtcgcccggcatgatagacgacaggatggtgagcgtcatcacctcgacgcccatggacatgatgttcaccatccacatgcagcccacgtcggccgagagctcgcgcaaggcgaccgacgcctacatcgccgccgtcgagggcgacacgcacgaccgtgccaaggaggcgcgtcgcgagaacatgccggcgggcgtctacatgacctccaagcacgtcgaccgcgcccaggacgcggaggagctcaagaaagaggtgcagttcggaggccacaagctcttctacacgaccatgagcgcgcatgtgcgcgccgagacgcccgacgacctcaagctcgagcagatacccaagctgcagcgggcctgcgggaggtggggcgtgagcgcgacgccgctgtcggggcgcgagcggcagaaggacgccatgaacgcgacccttcccataggcaagaacttcatcaacgccccgtccacgatgacgaccgccaacgtcggcgcgctcatcccgttcacgtcgcgccgctaccaggatccgggcggtatctactggggggtcgacgcggagtcggaggacttcatcatgctcgaccggacggcgctcggcgcgccgcaccagatggtgttcgggatcacgggctcgggcaagtcgttcggcctgtgccgggagaacctgcagatcctgcttcgacgcccccgtgcgaaggtctacatcgcgtcccccgggctcgcatacaagccgttcgttcagctcctcggcggtaaatggttcgaggtcggcgccggctcgaaggactacttcaatgtcatgtccatcaacatcgaccaggtggaggacgtagagcaggccatcgcggacaaggcggagtacctcatgggccaggtggagtgcatgctctacaagggcgcggtcatggacggcaaggacacacgggctgcgaaggaggcgacgctgctctattcttgcatccaggattgcataccgaaggtctacggccgctacctcgacacgcaccgggccgaggacgtccccgtgctcgcgcagctcgccgatgagctgggcgacatgaaagtccccgtcgcgcgcgacgccgcccaggcgctcagcctcttcacgaccactacggcagtcggcggtcagttcagccagcgcgacggatctcccttcgacgacgatgattgcaggctgttcggcgtcgggttccgcaacgccggcgacatcatcaaggcccccgcattgttcgccttcacggacatgttctggaggcaagccgtaatgaacaaggtgaagggctatgaaacgtgggtgctgttcgacgagttccagaccttcatggactggccgatcgccgcgcaatatttcttgaaggcgtggatggaaggccgcaagtacgacctgtaccagacgggcgccacccagaacgtcttggcagtgctcgagaacgccaaggcgtcccgcgccctggacaactccggcgtcgtcaccatgtacaacatggcccacgacgacgcgagggagctcgccgagcggcttcacatgtccgagcggcagatgcgctacacggtcaacccgcccgagggccacggcgtcttgtcggtcatggggtcggtcatgccgttcaaagactcttggcccaagggcaccgagacgtacaaggtgttcacttccaaacccaaggaaaccaaagggcgagcgatgtaggccatgtacgtcaacatcggacatagcgaggacgtcatcgccgcctggcaggacgacgccaggccggaggactccgcgacgtttgcgggcgacgcgccgcagagcaacgcgcgcagcgccgatgcggcggcgctcgagacatcgggcatcagcttcgcggccggcccggccgcgccggccggcacgatgttcgactccaggctgtcccccgcccctcccggcgcggcggcgagggccgccggcgcgctgcaaggggccggcgcgcaggcgtccgccgtcccggcgagccttggcgcggcaggggacacgggcagcgccgcgccgcgtccggccgtacccgcgccggcgggcttcgagtctgcgggcgcgccctcgcccgccgccgggtccccgtcccctgggagcgcggggaccgcatccgggagggctgcggcccccgccgcgctcgggatcgccgggacggcgtggggctacttggagagcaccgtggacgacggccgcgacacgtcgtcggaggccggatccgacatgttggtcggaggcgcttccaccgtcgcgcgcagggccgcgaggaggccgggccgggcaggatcgggacagggcccggccgggcccgcgggccgcgccgggctgcccggcgatcccgcgcgcccggccggccgcgcgcccggcggcc

SEQ ID NO: 82 - DNA, 6663 bp, Gordonibacter urolithinfaciens
  source 1..6663: mol_type = genomic DNA
gaggtcggcgcgatcctcgagcagacctctggcatgaccttcgataccgaggacagccgccgcgccctgtccgtcgcgctgaccgagcagctgcggtacacggacggcacgccgttcacccgcggcggccagatcgccgaggccgtcggcatgctgctgggggatcagaaatgaacgtcaccatcacttttgcaaacaaggtcgagagctactacacccgcgccgacggctcggcggcactgagcaaggacgtgctcgagctcaacgccgacggctcggcggcggtgctctggagccgcctcgagttcgacaggggcggcggcgatgacgggaccaagccccggaccgaaaggggcttcagccgcgaggtgctgcgcctgccgcccgcggcggcactcggccccggcggcagcctggacgagttctggacccgcgccgcccagcactgcggcgtggccgaggtcgagatcgacggcaagctcgtgtacccgttctaaacctgccgccgcgatgaaaaccgaagagccccgcggggcctttgagggtccgcggggctcttgtcattctccccctgggccgagcagcttcatggccatgcggccgcggcgccaccacggcgtggccgcgatcgcctgctggcgctcggcgagcgatgcgagctttccggcgagctccgcgaccctagcgttcgcctctgcgagctgcgccttggcctcggcctcggcgcgggcggcgcggtcgcgctcggccgcaagcgcctccatcagctcggcgttgcgggaccgttcgatttccagttgggcggccagggagtcaaccagggagtccggggcgggcgcagcggccggctggcgggacggtttgccggggttcttcagggcgtcggcgatggccgcggcggcgaagtcatcgagaaaatcggtattcccgtttcgtgaaacatggtttcccagtcccagtttctcgatgtagttcgcgactgtgcgctttgagacgcccagttcagacgctatttcacgcttcgttatgcccattgttcaacctatcgtcaatcgggaatgtttcccgggaaacatcgggaagtttcacggtagttcccgatgattttaccgtttcgcgttcccgtttttcccgtttctcgttctccacgtcgacacgtttccagtactcctcgaccccggtatccaaaccgatggccttctgcgtgagctccagcctggtcatggcggactgcggcggggtcaggtacccgcggtcattggcgctcgacgagtactcgtcgagagcggccccgagctcgaccatcgcggggttgtacagctcgtacatgtcgtacgggttcggtttttccagctcggcaacgtcctccgactcctccggaacatcgcgcagccatttaatgacagtcgtgcgcgagattcccagttcgcgggcgattgcgctgtggctggcgtcggggtgcgccgcggcgtattcgcggacgaggtcggccttcggctttcgtccgttgccctcgcgccagtttgtgccgttgaacctgtcattgacctcctggacagcccgggcaccagcaagatgcacatcctgcttgcgcccgttcctcttgttttttggcagctcgatagccgtgcgccgttctatgcgatcgcgggtgagcttgtggatgatggggtcgtagtacgcctcgatcgccgcgagcgcgtggtcctcggtgaagtggttgtcctcgcgcaccgtcaggccctcgagtgtcggcacgagcgcgagagcgtcggcctcgagctcgtcgtacgggatgccgcacttcctggcataggcggccaggacgttgaggcaccagtagcggtggtggtcggtggccttcgtctcgacctcgccgagccaccagtcgtacaggtcgcgcttgcaggtccagcggccgggggccttgccctcgacgatgcgcgcctggtaccactcgggccagagcttcttggcgcgctcgatgggggtccgcccggcggtgcgcatgagctcgatgagctcggcgcggtccttgccgccgcggacgccggcgtatccgagcaggtagtcgaggctgcatcgccagggtttcccgtcctcgccgttgtggacgaacgccacggcctcgtacttgtccttgattttcgacccggcggccttgccgttgagcttcgtcggggtgccgggcatcctgaagggctggtagatgccctggtgctggacgtcctcgagcgtcgagacggtatcgcgccagatgtagtccgtgagcatcgccttgatctcctgcacgaacggcacgatgcgcgggatcaacgggatcggctggtcgagcacgtagtagaggtggaaacccgtacccgagttcacgaggaaagtcggctgtgggagggatacccatttgtccgcggcgaacttcgggtcacggccgtttcggaactgcttcagcatgttcttcagctcctgcacgccgacgccgtcgaggtcgatcgcgaacgcgtgcaggaaccgggcgttcgcggcaacgcggctcttgccaaaatacgacacaggtgcgcaaaagacggactcgttcttcctgttcgagtcgacgacgcgctcctcaactccgtcgaggtcgtcggtcagcgtgaaccgctcgatcacggggacatcgtgctcgatgcccgtcttggtcttgactgtcttggtcttatgggtgatctggatgacgatgccgttgggatggccgccacccctctcatgccacgggaccacctcaccgcggggctgcaggaagccatcggggaagatagtccgccagaagtcgtacgggctgacccattcccaggacggatagtcggacagaaggatgtcgttcttctctatgtaggcatggcgctgggctgcccaccaggcgtcatcatgcccgggtttcttcttgcgatctgccactgaacaccaccctccataccagccgcccccgagggctaaggctatgcctttacaggacgtatattatcaatacatttattgtacacccctgcggcaaaaaaaaattgggctgcgaaacccgcgatcatggcccgcccccgagggctaaggctatgcctttacaggacgtatattatcaatacatttattgtacacccctgcggccatctgtataacgtgttttacacctatacggcaaatggtgtgctagaatgtataacgtgttatacagatgattgggaggtgcaccgtggcaactgctaccgcggcattgaggatgcccgaggacttggcaatcaggtacgaccgtttggcgaaatcaacgggacgcacgaagactttctacatgacagaagcgctcgctgccgagattgacaggcttgagtacgaatacggcctattgaagaaggtcgaggattaccgggccggcaggcttgagaccgtgacgctcgacgagctggaggaaagccttggcttggcggattgagatcgacaaggacgtccagcgttcgatgaagaagctggacaagcagatcgccaggaggatcgtggcgaaacttcatgagatttcacagctcgaagacccgagaagcatgggaaagggattgaccgagaacaagtcaggtctctggcgctacagggtcggtgactatcggatagtcgccgatatcgaggacgatgttctcgtcatccttgttgtcgatgttgaccaccgaagcaaggtctacaggactcgcaggtaggcgggtcgacaccgctaacgaaacggggaggggttttgaccctccccgtttttacgcttgccaccacggacgcccatcgtacggacgaccgtcgggcagcctgtcgtactcgcgcggccccgtctccagcagctccttggcgcggtctgggtcatagcgcacatcccagggagagcagtaataccatgcggaattgcctccgtatcgggtaagccgccaccgagcttcggcaatcggaacgaagccgagatcgcaccactggtaggcggtgtggtcgcggcggccctcctgcaaggtttcctcgtcgatgtgagccccccaacaatcgagaaggtctttgcgatgctgttccgcgcgggcggcgccctcgatgcgcccgcactcatcggcctcgcgcttcgccttggcgtcggcgcggcggcggcggttgaccgcctcgacgtcctttttcgcccaggggcgcgtctgctcgatgttgtagaacatcgcggtcgtgtttccgttcggggagcgccaagtgcgctccacaccctttccgagctggcctttcttgacatggcggtacttcttctcccactgtgccgcggtgcgcagctcgacgccgtcaatctcaatcatggcggctcacctccttgggcagatcgcagtcgaggtatacgcgcacgtacctgctctcgccgcggttcgggtactcgcgggagcgctccagaacgcaccccgccgcctgcatcgcgtcggcgatgcgctgaacctcgtcgggcaggccctcaagacgaaccctgaccatgacaacctccttgccttgaaccctgcgccaccgtccgtggcgcagcctaagcgtacggctccgaaaaagtccgaaaaagtctagttatcgcaggtcagacgtgccatcgcgcaggcgcacatgcacgcgtatatttacacgtgcgacccctcaaaaatatttttcgccaacctccgcggcgaccgcgggcggcgggattgccgccgcgaacggtcatggccatagccggcgccgatgtagctgaagctaccgcggcggctagtgcttgtggccgcgggggcgtttctgttcggcctgcggcggctcgggcttgcgaggcgcggggtcctcgcccgcgagcctcgcccgctcgtcagcgagcttgcggcgctcgatgcccagtcccgcggccttgagcagggggccggacagcatcgcagcgctgttgccgccctgcagctggcgaatcttgaggtcaagtgcggcaatttgctcgtcgagctgagcgatcatctccgcgcgggtatcgacctgatccgcggtggccatggccacgcggcgctgggcatcggcggccgcggcggcggtggccatggccacgcggcggcgcttggccagcgcgcccctgtgcctgccctgggcgcgaccgcgcttagccttctcgatgcggccgcgctgacgctcgagctccgcgacttcccgttgcagctgctcgagggcggcgccctcctgctgcagctctgcgcgaaggacccgcaggcgggcgttgcggtcgcgtatctctttattcagcttgacgcgatcggcgtgcccgattagcccggtgccgccctcatgcacggtcggctgctcatccagccctctatctttattgctgcgatggtcgataacctgtgccgtggttcccgttgcggcggcgtgtgccgcgaggtgcctgttggcgatctctgcccaagccgcgcggacggccatgagttcagcgctaccgacgtcgcgcgcggcctgacccgagatacggtgcatctgcaccggcctcttactcgtgcggtccttcgtacccaggccctcggccttcgcctgcttcatggtcaggcggcggccatccttgaagttatatatcttctcccagccatctgccttggctgccttccaatcggttgcgcggatgggtgcctgctgcccatgtgcatcctggcacagataccagcactgccccttctcggccttggtcctctggatgaagccctgagcgccaaggtcgagcgcggagacgaggacgtgagcgtgggggttcccgccgctgccgtcatcatgtatcgaccagtcgcacgccttcgcggggaacatcccgcagaagtcgcgcacgcaggcgcggcagccgtcggcatcgagctcgatcggcaacgcaaactcatagcgcagcgcgacgagctcgttgccgccgccgccctcggcccatgcccgctcggccacgttccagagctcgccgcgcccgatgggcggcacgccaccgggcagagacagaccctcctcgacgacgcgttccttcctggcatagtcgcagagctgccccgtccgctcttccacaagcgcctggcccgactggtacgcggccttcctgaccgcgcccgccccggtggcgggcgagcagccgcggtagttcagatggaagatggccatgcgagttcctttcaggcaaggggcgcagatgcgccccgcgcagcggcgcggagtgccgtgagccgcggtcggcgaacggtgcccgcggcgcggagcgcaagggagcgcagcgaccgcgcagcccgacccagtagacgtgagccgtctcaggcgaacggcttcggggtcgggcgtagggccgtctgccaagaccgcacgcagtgcaggacttttgacgcatcgcggcaaaagtactgccaagtgcgcactacctctggtagtgatatacccagctcgcgaaattttaccgtgagtatgggtatattttgctgcaaagacaaaacgctaacgagcaaggaagggcggtcatttatgacggcatccatcgacgagcagattgcacgtaagagggccgcggccgacaagcaggcagctcgcgccgccgcgctgaagaaggagctgagggacctcgagaagaagaaggccgcggccgagcggaaggcccgcacgcaccgcttggtc

SEQ ID NO: 83 - DNA, 5799 bp, Gordonibacter urolithinfaciens
  source 1..5799: mol_type = genomic DNA
ccgcggccggccgcggcggcttcttgcgatagccgcgcggctgcgagcggatgataaagaaccgttcgaacccgtcgcggcgcgccgcgtccagcaggatgccccggctctcgcccaggccgccgtccatgaacgtgcgcccatcgattaccgtaggcggcatgaacaggggcatggtggagctggcccgtacccgcagcatcatgtcgcgaagcgtggggcagtcggccttcgtccaggccaccgtctcgccggtgtcccagtcgaagccctcgatgtgcacgtcggcgtcgctggctgcgaacgtgtcgaagtcgaacgccatcacggcgtccgttcccgccagctcctcggcaacgccctcgtacagatacggcgcgttgaagtagccatgcccgcgcaggaagctgccaacaccgccgaagcgcgggtcgcgcacgagatcgacgaacgacgccttcgtgcgtgcgatgtcgcgcgacacgtagttcaccgcgtggctcgagccggcggagatgccgtacacgcgcccgaagtgcagctggcgctccagcagcgtgaccatggcgcccgccgtgtagctggcgcgcatgccgccgccctcgatgacgagcgcgacgtcggatatgttggccgtcagggtgcccatgggagtattatagccgtgccgcgggctctcctgggggatgcgataccgcggcgtagccgaacgagatgagagaggaaacgctaccatggagaagccgattctgtattactgggccccgtgccccacctgctccgtcctgacccatttcgccgaagagcacggcatagagctcgacaagcgcgacgtggagcaggaggcaccctaccaggagctcctcgagctgggcggcaacgccgacctcatcccctacctgtgggacggcgaacggctcgtcaacggcaacgacgagtgcctggcgtacctgcgcgagaagtacctttaggcagcgggcgcacccgagcaggggcgcccccgcagcgatctctcgcgcagggcgccctcgctcccgccgctcaccgggtcacggcaaccgcggcgctgcccgagctttgggtcgccgagctttgggtcgagctggagggcgagccgcccgaattcggctgcgaggcggaatcgtgcgagccgctgccggactgcccgctgccgcccgatccgctgctgtcccccgtgctgccgctgccggagccgtccgacgagcccgacgagcccgacgagtcgcccgagggacccgaggaacccgacgagcccgaagatcccgaaccgcccgacagcccttggtctccgcccgacgacgagttgtcgcccgacgagctcgaggacccgttcggcgccgtgtccttcgaagggtcggtcgtggaggaatcgttcgagcccgatgactcttccttgtccgccggctcatccgaagcatccccgcttcccgaggagtccgacttctgggcctgcgatgacgaggggatgaggggctgcgtcttcgcgcccacgccctgcccggtggtgacgaggtcgatgacgagggcggacagcgcgacggccacgatagcggacgcgatggacaccgccaccacacgtcgctgcagcttcttcctgtgttcgcggcgctcgcgcgcccgctgcaccgtggggtcgtcgcgcaggccggcatcgtcggcgcgcggcgtgcgcgagcgccgcgccgcctcgcgcgactcgatggagtcctgcggcgagaggcgcgccgtcttctccgactgcgggagggttgccgtcctccccgccgatccggcagcatgccgggcggcggtccaccccgacgggtccggcccttccgcccccgcatcgtccgaggcgccctttgcgggaggcacgtagccggtctcgcccggcttcagctcgcgcagcttctcggccgacgcggtgaagaacttcttgtacagctgcgatgccaccgccgacacgacggagcccacgcccacgccgatcacggagccgtagatgcctatttgcgaggccagcagcatggaggtgacggccgccagcgcaccggctacgacctgcgccaccgacaggtcgtcgaacagcctgcccctcttcgccttcccgccgcccgcatctcgcgccatgccgcaacctcctgttcgcctcgcgtccgttccggggccctcaccccatccgaacataccgcacgcctgtggaaccctcgcgcactccatccaatcgttatcagcacgccacagaacatgcaccgctttcgcttgtcctcagctggcaaaggcgcgcgactggtatcatgcgaaaggcgggaggggtactgctcggcccgcgtagaatcgcaacctagggaaaggaaagcacatggaagcaagcttgctcgaatggacgctcgtgtcggaatgccctatcccccaggatgtggcgaacgtgctcgtgcagggcgagcagcccatcgccgcgtacaagacgctgcgggattcggccatcttcaccacgaagcgcttgatcgtgcgcgacgcccagggtatgacgggcaagaaggtggaaatctactcgctgccgtggaagtccgtggacatgtggtcgtcggagacggccgggcacctcgacctcaacaccgagatggagttctggacacgtgcgggccacatcaaggtcaacctgaagaagggcctcgatatccatcggctcgacaacatcatttcccactgcgtgctggggctgtaggcgccgccccagcaagccgccccccgacggtgcctaaaacgggtccacgtagagccgcatgccgtcgggcaggcggacgaggcccgcccgctggaggacgtcggcgaacggcgtgtccagcacgggccggccgttgaacgtctccaccacgaccttcttgcgggcgccctccgccccgtcgcgccgcaccgcacgcgccgcgtgggcgacgagggcgcgagcggcctcttcgagcgccgcctcgtccgcggtgaaggccagcacggagcgcaggctcgccgcggcgtagagcaccggcacgccgtcgcgcatggccacgaggctccccggccggcgcgcggggcgcgcaaccgagggcatgccgtcaggcgaggcagaggaagcggcgccggaaggagccgtaggcgcggtagcatcgccgctagcaggggcttcagatgcaggagcatagccgtcagcgaggggcggccacggcaggccggccccgaacaggcacgcagggtcgtcggccgccagcaccgcgcatccttcggcaccggagcggccgtcccgcgcatccccttcggccgcataggtgcgcagcaggtccaccgtctcgcgggcggcgaactgcgccgggccgaggccctttacgaacatgccgcgcagaaggtcgccggcgtcctccatcgaccgcagcaccggcatgagggcgcccaggccgccgggtacgccggagagcagggccacgtcgcgcgcgagcacgccgtaacggtcgaggatcgactccaccagcgccacggcgcgcacggtgtcgttctccggcgacggcgcgagcagcgaccaacggcccgagagcgccgcgcctgcggagccgacacccaccacggaggcgcgctccgcggcctcggcctgcagcccgccggccgcagcgccgcggtagcgcgagcgccggctgcctgcgcggcgcttcggcgcggggcgcggacgcgtgcccgaggccgccgcctcggccgcacgcaccggcgcgaacgtgtcgttcgtggcgcgcccgccccacaccagctcctgcagcgccgcggcgatggacgcctcgtcgacgcgctcgggctccatccggcgccgcaccgcatcggctatctggcggaagaacagcccgtagccgctggcgagcgcctccacgacggcctcctccaccgacgggcgcacggccggctcaacgtcctccgctccggccaacgccgcatcggcctgcacgggcgcgagcggcgaatccgtggggtagaaggccacgagcgcaggcgccgcggcagccttccccgccttgcgcgagcggctgacggctgcaggcctcgacgaggacgcgcagaacaacctggccgcgctcgtgcgcgcacagcgcgaggccaccggcgtcgtgccggacgataagacgctcgtggtggagcgttgcgaggacgagacgggcgactggcgcgtcatgctgcattcgccctacggccggcaggtgcacgagccgtgggccatggcggtgcaggatcgcgtggagcgcacgctcggcttcgatccgcaggccatggccgccgacgacggcatcctgctgcgcgtgcccatgaccgagacgcgcctgccgggggcggagctgttcgcgttcgaccccgacgagctcgtgcgcatcgtgcgcgaccgggtggacaagacggcgctcttcgccgcgcggttccgcgagtgcgcggcgcgcgccctgctcatgtcgcccacgcagccgggcaagcgcgcccccttgtggcagcagcgcctcaaggcgggccagttgctggaggcggcacgcggcgagcgcgacttcccgatactgctggagacggcgcgcgagtgcctgcaggacgtgtacgacctggatgcgctccacgagctcatggaggggcttgcggcgggcaccgtgcgcatggcggaggcgcagacgagcatcccgtcgcccttcgccggcccgctcctgttcggctacgtgggcgagcacctgtaccagggcgatttgccgcacgcggagcgccaggcgtcgctgctgtcgctggacccggcgctcttgggcgagctcttgggctcggccgacctgggcgagctgctggacccgcaggtggtggcccaggtagaggcgcagctgcagcgcctggcgcccgaccggcgcgcccgcggcgcggagggcgcggccgacctgctgcgcgtgctgggcccgctcacggcggaagaggcggccgcgcggctggaggcgccggggggatcgcctggacccgggcaagaagacgagtgcgatgccgatgcttccggccgcgtcgccgggcgggagcgcccatgggacgccgcggccgaaggctcaaacgcctcgccagctgaaacctgcgaaggcgcggcagccgctcccacgccttcgcgttctgccacccctgccgaggcccgcaccctgctggaggagctgcgcgacgcgaagcgcgccttcccggccatgatcggcggcgtggagcgctgggcggccgtggaggatgcggggcgcctgcacgaggcgctggggacggaggcgcccgcgtgggttcccgcagcgttcctcgaggtgccggacgcgggcgacggcccgggaccgctggacggcctcgtcgcgcgctacgcccgcacgcacggtcccttcggggaggcggaggtggcggcacgcctcggcatcgggccttcggtggcgcgcgagagcctgcgccgcctagttgcggccggcaaggtcgtgcagggccggttcggctgcgcggacgggccggggcctgcgggcgtcggggccgtggctgcgatcacggaggccgagcgcacttgggtgtcggcggaggtgttccgccgcctgcgctcgcgctcgctcgcgaaggcgcgcgccgccgtgcgcgcggtgcctgcgagcgcctatgcgcgctacgtgctggatctgcagggagcgggcacgagcgggggagcgctcgaggggacggaaggggtagctcaggtcatctcccagttcgagggcgtgttcctgccggccgcggcttgggagggccacgtgttccccagccgggtgcgcg

SEQ ID NO: 84 - DNA, 6529552 bp, Bacteroides ovatus (residues 1-2,176,518 of 6,529,552)
  source 1..6529552: mol_type = genomic DNA
gtaatttgaattgtgctttggtgcgaacgaggttatgttccggatatttgattttataataagtatctccgttgatataatctgccaggaaccgtacacactgcatgtatgggaataaagccgccgcataaggaagattctcaatctcgatctgagtcaggaatgatttggctcctttcagatagcccttggtaaatgctttgaatatttccatattgaagtttacacgatcaaggtctttgtcgtcttcatcacctgtgttggcacctgtacgtaagaagtcaccataatcggagaatataaagctaggcattaccgtatccagatcaatgacacaaagcactttaccatcctcgtcgaacatcatgttattcactttcgtatcgcaatggcaaacgcgtttgggaagtttcccttcacgatataaacgttcagccttacacatttcatctgcgcgtttctctatttcatccagatagtacttcacttctgctacccgtccggcagcatccttcgcaacggcttcacgtagttgtttgagacggaactccatgttgtggaaatcgggtatggtttcacccaatgtttccggaatatcggccagcatagcctggaagttaccgaaggcttctcctgcataattggaatattcgggatttaccgtctcatacgtttttgcacgtgggatgaataccatcacacgccaataactgtcaccgtcaaaccagtatgttttaccttcttctgtttcgaggaaactcaacaccttgcggtctatatccgattctccggcttccgtcagtttcttgcgaatgtgattggtaacagcgctaatattggattgaagcatttctacattctggaaaatggcatgattgatgcgttgcaaaacatagtcgggagcatctgcttctttggtgtttactttataagtgtcgttgataagtcctgcacccaaaggtttgatttcttctatcgtaccttggactttaaatttagctacgatgctagataaatctttcatgttttttttctttaaaaatttatactaaggttatcgataatcatatttagcagcttcgttggcctggttagccgagcgaacgggtactaatgtgaagccccactggtaatcacggttagccgggatctggtggaaaggttccgggcgagcaccccaactgtcatatccgcctactccttgttgcttcatatctacacaaacctcaacgaaatctctgggagtgatgtcgttgacatgatgcattctccgtaatacgttgcgggcagcgttctcgtcgtgattggcaacctcttccgggctgaagttattccattggtaagggtggggcagagcttcttcagagtcaaagtcttcgatagagttgcgcaaggcattgaaaccgataagactgtccgctaccaacaccaggccgtttcctttattaggagataaagcgatccaacgggtatcagtgtgatgtccgttttcctgtggacgcacatagttgaagtacatttgatccgctgttgtcttatatacgccaacgagcgttccgtgattgcggtcgatataattctcttccggaccacggccaaagtattgtacattgttcatctgtgccggcaagcggaaacgcacaccgatacgggggacttccagtttggaggcagccttgcgggcagcatcacttccgggagtaaatgtagccatgcgggtagcttcggaaacttctgtttctgtaggctgcatatccgttgatgtgaatttggcatttacgttaactattccgttcggatagattttgtaagtgacaacatacaagttgccggcagccagtaagtaggttacatttaaggagactgctttatcttctgctgtcatggtggcatccgttatgcggaagtttttgcttgattgtttccatacctgcaaacgtttaggagtgctgttaccatagtcattatcattaggagcacgccagaagttaggctgaataccaaatccgtctttgaaatattctgtaccatctactttatacgaggttactaatccgctattcttgttgaatacaaagtttactttggaggaagaaacgattaattcatctccttgaatcgttgttttcaatgccggaccgtttgctttatatatactcttctctgcctggataggaagttggaactggtcgtatgcaatttcatatccggttggaatcaacggttcaggctctgtggttgttacactgaagttgacaaaatattctgttcccggttgggctttcagaccatttaccggtacggtgaattctttagaggcttgcggagcaatatccaaagatacttttccaccttttattgtctttccgttagcaagtacattgtagtgaatctgatattttttcaggttagtgaaatagaaacggttggtgattttgaatataccggctgcggcatctactgcttcaaaacctacattctgatgtacatatttcacttcagccattgccggatgcggaccacgatccggattgacaagaccgttgcagaggaagttaccatcgctaggtgcgtctacgccgaagtcacctccgtaggcccagtattctcttccattcttatctttttggagaagaccttggtctacccagtcccagatatatccaccttggagattcggatatttgtaaattgcctgccattgtccccacaggtttcccgtggagtttcccatggcatgtgcatactccgaaggagctacaggacggtcgctaccattctttccgatattttccagccagtcggcacccggatattgcggaacatacatatcggagttccattcccattgagcacgttcgtagttgaccggacgatccatcagatctttgtctgcctctttcaaccacaaataagtctgatagaaattatatccgtttccggcttcatttcccagcgaccagaatgtaacgctcggataattcttattacgttcaaacatattgatggtacgatccatgtgcggtttcagccattcgggattgttacccagtgaaccgcctttccggagatcataatacattccgtggctttccacgttggcttcatcatatacataaagtccgtattcatcacaaagctcatagaaacggcggtcttgcggatagtggcaaaggcgtacactgtttaagttatgttgtttcatcagttcgaagtcacggcgcattaaatcctctgtaacataatgacctgttgacggattatgttcgtggatatttacccctttcagtttcagaggctgaccgttgatgaataagcagacatacggttttccgttagcagccttctgttcgataggcttgatctcaatccggcggaatcctacattgaaaggaatgatttcattgattttgccattctcttttactgtcatcaacagtttgtatagattcggatgttcggaggtccatgtgctgacatctgtcagattcttatcgaaagaaagtgtacgtacttcgttcgatggaatataggctgtcttctcttcagtagctacaacttttccttgtgcatctaatagttcataaactaatataagattagttgcagccttttcgtgatttctcaaatcgacatttaaaccgaagattccatttttgtaactgtcgtccagcgtagacttaattcggaaatctttgagagctgctttaggctgtgaatacagaaaaacatcgcgttcaataccactcatacgccagaagtcttgacattcaagataggaaccggtgctccaacggaagattttaactgtaagtacgttctttcccggcttcacgtaattgttgataagaaattctgccggattcttggagtcttcgctatatcctacttcttgtccgttgatatatacatatacgccggacttagctcctgccaaatgcaagtagatatcccgcccgtcccagtctgccggaatatcgatgtcccggcgataaactcctaccggattggcttcgggaagagtaggaggttgtggattgcgcggtttgaattcataaccatgattggtgtagatggctattccgtgtccttgtacttcccagttgccgggcacctgaatatcatcccacgaatctgtattggtgttcggatcggtaatgttttcgggaagttttttataagagtctacaaagtagaatttccaggttccgttcagcaagcggtaatacttgcttcgttcgaacttgccactcaaggcatcagcgcgattgttgtatgtcataaaagaagtacgtggatactctttgttaacttcaactacctgcacgtcctgccaataaggtttcacggctttctcagccattgtactaagtgttgtcagggaaaatattcccatgaaaatgcctgttaataagttgggggttggtcgaaatttcatgtttctcaatattggtttttcatttcttttttattttactttaatatgatcgaatccttctccatatactccaatgacagcactttgcgatacaaatgcattcgggtctatgtcttttattaaccggaagatgataggcgattcccttttcttggctaatacaaacatcatcttaacttctcgtcctgtataaaagccggttgcattgataatcgttactccccggtgtgggtattcgttaatatgccgtcctatttcttcatatttgttggatatgataaagaactgtacggattgacgggcgctattcactacctggtcgagaacgaaactacaaatataaagagttacaaacccatacaccactttttcccagtcttttaagacaaaataactggaagaaatgataatcatatcgcagatgagcacgactcttcctaatgtgatgtcccggtatttgttgatgatggctgcaataatatctgtacctcccgtacttccattagccgaaaaagcaacacctatgccgcctccacagaaggatgctccgatgacacatgccataaagggctggtcgtggagaagcccgaaacctgccgtcaatttttgaatgacggacagaaagaaggtgagggtaaatacaccaaaaatagttttgatgcaaaactttagtcccagcaacttgagggccagtagtagcaagaagaagttgatgctgaagtacgtatattgtaccggaaaacctgtggcccaatatacgatagaagcaatacccggtactcccccggtggtgatatcgttaggcaacagaaaaacggtccaaccgataccatacaaaatcatgccgatggcaatcattacataatctctggcttcacggataatgctttgcttagaaggctttggaatagctgttttcataaacgtgattatgataatctataaaatgttcaaacacgaacccatgaataatccggctttagaggagaagccggattggttcattatgctcgtgctaaaaggaaatatgctgttttattttgcaaaagcgtgacggtagccttgtactttattccatccgccgcgagtgaagtcgggtacttctaccggagctgaattgttctcgatagaaagtctggtaagttcagccatgcaacaccattctgccaggtcataaacgtccatatccaatggcagtccattctgcaagcaatatgccagacggtagtccatgataaagtccataccaccatgtccacctactttcttggctgtttcttccaactctatatgaataggatctttatatttatccatcaaggctttttttacgttttcaggtacagaaccatgtgcattcagattctcatgattaggcacatcttttgaatcaacttgtgaaggtcgcaggcaatattcttcaatcggatatttgcttgcgtaaccatcggctcccactatctgatacatacggctgtatgggcgtggagtcattacgttgtgctgaatcaacattgttttaccgttctctgtgcgaatcagggtagaagtctggtcaccattctggaagtcagtcacctcttctcctgtttgtttcttaatataagccggtccgttgacagctttcgtatccatcgataccaatgttttcatgcggtcaccacggtggatattaagtacctgacaagcagggcccatgccatgggtagcatatacatcaccgcggtgtagatgattataatccattcgccagttattccagtattcaggccagaaatcttccagattatggatatatgaaccttctacatgaagtacttctccgaatacgccttgttgtgccatatttaaagaagtcagttcaaagaagtcatatacgcagttttcgagctgcatacaatgcttacgtgtcttttcggaagtattgattagctgccagatttcatccagtgtcatggcggcaggaacttcgatagctacatgcttaccgtgttccatggcataaacacccattgctgcatgatgtttccagtcggtggctatgtataccagatcaatatcgtcccgttcacaaagttgcttccatgcctcttccgagccactgtaagaagcagcttcaggaagtccggcattcttcaaaatttcttgtgatttttcaacacgttcgggaagcaggtcgcataatgctacaatcttagttcccgggatatgggtccagcgtaccacggcaccaggaccacgcattcctaatccgatgaaaccgacacgaacggtatcaattttaggagtaacgagttggattacatcttcttgtccggcagggcgggcaggagtttctactttgataggagtaaaggcttcgggagcctttggttgtagagtacaactggtgtgccaagttaacaaagccaagccgatagccgtgactgtaaatagtttcttcatcatattttaaagtttttaataggggttattcgatgtttttcatttacgtgtcaaaaatagtaattaattagccaactatttatatttataatcgatattttcatcataaaagtttctattatgaggtaaaagatgagtctgactttttctacctgattttgtgtaggcttatgtgatgtcaaatacatataaaagacatgccataaaaaggctcttcctaaaaagaagtcacctttttagaattgcttaacgtttactgctcctgttggggtaaactacctacttcgtctgtacttctgatagaacctagtatttgtattttttccaggctcccctggtgaaatccggtatttctactgccatgctcttattcagtacagatttttcacttagttctgtgatacacgaccattcggctgcatcgtatacatccatatccagtggaagcccgttgcgcagacaatgaataaggcggtaatccataacataattcatttcattgggtaggcctctgcgatgtgcttcttcgccaatggttgcgttaaaaggatgtttatagcgtgccatcattttttctagcagttctccttcaagtggagtgtctccattaggatctagggcgatacaggggacagggtatttttgggcgaatcccagtgtgccgcatactgtttgaaggcggctgtaaggacgtggggtggatatgtcgtattgaagcatgattgtcttccctttgagcgtgtggataagagtggtgtttacgtctcccaattgatatttctggtgggcttccggtgaatattcgccgaatagtctgcgggcatactcgctcattcctgcctgatgagtagacatggacacgagatattccattctgtcactgcgatgaatatccagtatctggcaggcggggcccaacccatgagtgggataaggattgcctgtatgttcgatgctgtatctttttccccaatggttgtgatagccgccttcgctctcttcggcaaagtacattgaacgaagatcgtgaatgtaggctccttctacatgcatgatttctccgaacaatcctcgttgggccatgttgagagtcattagtgcaaagggatcataacaacaattttcgagcatgatgcagtgtcgcctggttttttctgcagtgtctaccaattgccaacattcttccacgctcatagcagccggaacttcaatagctacatgtttattgcattccattgcgaaagttgccattggagtatgcattaaccagtcggtgcagatgaatattaaatctacttcatccgattcgcacatcttcttccatccctccactccggtatatccggtggcttcggaacggtcggcttcttttaatagttgttgggccttacttagatttccttctcttatttcacaaagagctttgatttctactccttcaatttgcagataacgttgtaaggtgagcaatcctcgattgcccagtcctataatcccgatgtggacagtggggatagggggatgtgctagtcggagtacatgcgattgtaccggagaatttttcataagcttagcggtctaaaataaaacaaaaaaagagaatctaatttctcagattctctttggagagcggaagacggggctcaaacccgcgaccctcagcttggaaggctaatgctctatcaactgagctacttccgcaatttttgtgggcaaagatggattcgaaccaccgaagtcgaaagacagcagatttacagtctgccccatttggccactctggtatttgcccttttttgcttttgaggaggtttgtttctcaattgcggtgcaaagatacaactatttatttaaactccaaacaaaatcgatcatttttattgcagtaattgcacattcatctcctttgttacccagtttgccaccggcacgatcctctgcttgctccattgtatttgtggtaattaatccgtaaatgactggtatatcgccagttgcgtttaattcggtaattccttgggttgctcccatgcaaacataatcaaaatgtggggtatctcctttaattacgcaaccaattgcaataattgcatcaagatcgcaattttccatcatttggttggctccaaaagtaagttcgaaacttcccggtacagttttcaccagaatattttcgtcttttgctccatgtttttttaatgtatcgactgcgcctttcagtaaagcaccggtaatattgaaattccattcggatacgacgataccaaatttcattgcttctgcattcggaacggaattgaaatcatattcggataagttatggtaagctgttgccatagttaattaaaagttgagaattataaaatgaagatttgagagtatgagagatttaagaagaaaggcacggatttcacggattccacggttttaatagatagtccgcttaatccggtgtaatccgtgcctcgatttccttatataatagatggtatattattttttcatcaatttagcttgctcgatatatttgtcgatgtccatagcctgataagattggaaatatttatccttgatcttagtgtaagcgtttacagcatcgtcatattttccctgttttaccaggatttcaccagcttgtatcaggaagatcgggcttaatgtgttgttgtcagctttgtctgctgccgacaataaagtagaagccgctttgtctaattggccaagttgtgcatagcagttacctgcagcacccaaaattgccggagcaaccatttggtcttttccattgaagctgtccagcatcttcactgcttcttcatatttgccaagttgtgcgtagcaaataccagcataagcttttgccaaattggcagcttttgttccgctgtagtcatcagcaactttcaggaaacctgtataaccgatgctgtcaccgttcaaagcttgttcaaaagcatcctgttcaaagtattcctgtcctttgaaaagagctgcctgtgctttttcttcacgtggttcagcatagaggtttttgtacatgataaaacctgctacaataataatcacagcaacaacaccgccaataattgcgtttttgtacttgataagaaatgcttccgattgtgtcagtgcatcttctacgttcagatgttcgttctgattcttttgttctgccattttatatgattctttttgttattattcacagtttgatatttcgactcgcaaaagtagtttttttatatctacaaacgaaatttagaagcatctttttttgttttacacccgaaaaccacgaaaatcttgctacttttgtgaacaaattaacgtgtacacaatgatactgaaacgaatatccatattaaactataagaatctggaagaggtagaactgggattctctgctaagctgaattgttttttcggactgaatggaatgggaaagacgaatttgctggatgcggtgtatttcttgtctttctgtaagagctccggaaacccgattgattctcaaaatattcgtcatgaacaagactttttcgtaattcagggcttttatgaagcggaggacggaactcctgaagagatttattgtgggatgaaacgccgttcgaagaaacaatttaagcggaataagaaagaatatagccgtttttcggaccacatcggttttctgcctttggtgatggtttcacctgccgattccgaattgatagccgggggaagtgaggagcgtcgccggtttatggatgtagtgatttcgcagtatgataaggaatatcttgaagcgctgatacggtataataaagcattggcgcagcgtaacgcattgttgaagagtgagttttcggtggaggaggagctgtttcttgtatgggaggagatgatggcgcaagccggtgcaatcgtattccagaaacgtgaagcgtttatccgggagtttattcctattttccaatctttctattcctttatctcgcaggataaagaggtggtgggattatcttatgagtctcatgcgcgggatgcttctttgttggaagtgttgaagcaaagcagggagagggataagataatgggattctctttgcgtgggattcataaagatgagttgaatatgttgttgggtgaattcccgataaagaaagaaggttcgcagggacagaacaaaacgtatctggtagcattgaaactggcgcagtttgatttcttgaagcgtaccggctggactgttcctttattattattagatgatattttcgataagttggatgcttcccgtgtagagcaaatagtgaagctggtggctggagacaatttcgggcagatatttataacggacacgaaccggggacatctcgaccgtattttacataaggtaggcagcgattataaaatatttcgtgtagaagagggcacaattcaagaaacggaggctgataatgaagcgcaatgatgccgaacaaataggaaaactgattcaacagtttcttcgtcaggagagtttggaatctccgctgaacgaacaaagactgctggatgcctggcctcaaatcttgggaccggcagcggcttataccagcaatctttatattcgtaatcagacattatatgtgcatctgacttccgcagctcttcgtcaggaattgatgatggggcgtgaggtattggtgcgcacgctgaatcagagagtcggagctaccgtaattacaaatattatttttcgttgaagaaagatattctgtctataacctttatacctagcttccggagtgtttcggttgcacggttgtaataaaaagggttttccaaatattgattgttatgggcgtctacgccgatgatagcggtgcaaccttcatgggcggctattttccagaaatctggatgaggaatggtagtaataccatgaatatcattgtactcttcatatccgatattatattccaacggtaagtttaaccgtactgccgtccggcagatatgtctgctgactagcttacaatgacgatcgaactcggggtaagaacgcataaataaatccggatgggcaaggtaggcaaatagtccgctttccattccttcaatagcactctcttcatagagttcgagcatgtctaccgaatctgtattccggccgaagtaggggaacttctcatctgtgtgaaaatggtgatttccaaagatgatatagtccagtttatattctttgatgattccttttaaccagtgtatgtattcaggaaagtattcgcattccaatcctatttttatgctgatttgatttttatatttctcttgcagcgaacggatactttccacatatcccggtaactcttcgggaagcatccggatgtcggatatataatcagtgtgatatttccacggagtgtggtcagaaaagcctaattcttgatagccgcctttgatggcacttaaaacaaattcttcgtcactccctgtcgcatgatggcagcgggtggtgtgggtgtgataattcgtcttcattgattgttatgattatatccatgcggatgtcgaatgattccgccggaacttcttctactaattgaaatgggaaacagattcctgctttataggctgatggtatgcgtggcaggagacggtcataatatccttttccccgccccaaacggttacctttagcatcgaaagctactccgggaacgacgatgaagtctatggccgcatagtctgtgaatatttctccggttggttctgctataccgtagataccgctgattgacatgtcttccggtccggtgtatatccgtagttctaaatcatcgcctactactacagggagtagaatccgcttttcgctactccatttttgaataaaggcatgtgtatctacttcgtcattcagcgaatggtatagtaatacagtatttgccgccctgaaagccggatgggcttcaagggcggcaagtatattagctgattgcagctttcgcatagttgaatccgcgtgttgggtcttcagtaatgctatatgcttgcgcagttctttttttctttccatcttttttatccttcgtcacttcttcttcaacggctaccggagctttggggaaagcttctcctttttcaagtatctcaatacctttaatgacagtagcatctgttttgttgaagtattggagataggcttccagtccaagcatattgtagatgatgttgccaaagaggttcttttccaatagtttgtatgatttctgaatgaggatatttcttcttttcactcctttactgtcggcaaaacggacaaactgttccaccaaaccctgatgacgaagatagtttagtaattcttcctcagtttcgtattggcttaacttcttccggttattgtcggtgtattggaatgtgaactgaatagtcagtccccggttaataactgtcgatagataagaagtgactcccgttgtatcctgcggtacgaatatatccggcatgataccaccgccgccatacacagtacgtcccaagctggtattataacgttcgctctcattctgcttgatactatcacgtgagaaaaattctccatgttcgtaacgggtgtataaatccagctcgtagttacggtctttaccgctttcgtatgggcgttggatgcaacgtccggatggggtgtagtagcgggcgattgtcaggcggatagccgatccgtcactgaaatcgataggctgttgcacaagtcccttaccgaaagaacggcgtcctacaactgtaccccggtcgttatcttgaatagctccggtgaaaatttcactggcggaagcagatccttcgtcaatcaatacaacgagcggcattttctgacaactacccgtaccgttggcaaattcttctgcacgtggatatttacggccttgagtatatacgatcaacttaccttcaggcaagaattcatttaccatgcggatagcagcttccatatatcctccggtattaccgcgcaggtcaatgattagacctttgcattttttgtggttgagttgtgctaatgcattaagcaattccacatggctggtacgtccgaatttgctgactttcacataaccgatatcgtcgtttaccatgtaagcagcatctacggtattttgaggaatgtctccacgtgtgatgttgaagtgtaataagtccttttctcctgttcgtttgattcccaattttacctgtgagcctttcggacctttcaaggtgcgcatagcccgttcgttcgttactttcttgccgacaaacaagctatcatctacagtaacaatgcggtcgcccgccattaatcctatcttttcagaaggacctccctgaacaacagcattgacatgaatggtgtcattctgtatggtaaactggatgccaattccgctgaagctgccttccagttcagagttgacttcttcgagattttgggctgggatataagttgaatgcggatccagttcggctagaatttgcggcatggctttttctaccaaatcggccatgtttacggtgtcgacatattgatcgtctacaatgcgtaacaaagcgtttagcttattggaggaaccattaatgatacccaaacggttgccggcaaaatgcttggcataaaatgtaccgataagaatcccgactaccacactgactgctatgatgacaggtgtaaaacgtgaagagttttttgtactcatgtctattccttttttaaaacgttcgtcttcttatttatttggagaggaattatcatctaactctgtgtagataacttcgattcccgcccgttttaataactctattccatcttccaggcggtaatgctcggaataaactacccgtttgattcctgcctgtatgattaactttgcacattcgatgcaaggagaggcggtgacgtacatggtagcaccgtcgctactgttatttgaacgcgctattttggtaatggcattggcttccgcatgcagaacgtatggttttgtcaggttgttttcatcttcacatacattctcgaatccggaaggtgttccattatatccgtcggagataatcattttatccttaacaattaaagctcctactttacggcgttgacaataggaattttcagcccatatactggccatacgtatataacgtttgtcaagttctaattgtttcttttcagtgtccatgttgtttactatttactgcttactacccggaaaaccatacggaaagtttgcttaccggatgccggtttgtataaaaggtataagttattactatctccttcgtaagatgtagctgcattaagcccctctataaaatttttggcgagtttgtcgtcgccataactacctgcagtggtaactgtagctttgaagctattgtttttggcgttggcattccattttccttcaaaagtactggttgcaattacagttccttttatatttccgttaataacatctccatctactgtgccatcaaatacaatattatatgtaccgtttttattaagctctttaatacttgctttctcttgttcttcattctcccaaaagccaaacatctcatgacctccatctactgtgatataatttagtttccaggtttttcctgtaaagatagcagctacatcgtccgaatcattacatcctgaaaataaaggaagcaataaaagcaatcctactatttgaaatatacttctcttcatatttaatatctaataacttaatacttatttctttatcccatttctgattagcaaagcatcaatgctcggttcctgtccgcggaaacgtttataaagtatcatcggatgttccgttcctcctttcgacagaatattattgcggaatgagtctgccacttcctgattgaatatccctttttgcttgaataatgaaaatgcgtcggcatccaatacttccgcccatttgtagctatagtatccggcggcatatccaccggcaaagatgtgggagaattgcgtactcatacaagcttcttgtactaccggcaatatttgcgcatccttccaggcttcttgttcataagctttcacatctccttcaaaaggagtgttgtgcgtataccatgccatatcaagtaaaccgaaacttatttgtcgtagacaagcatacgcaacattgaagtttgatgcatctacaaggcgttttatcaattcatccggcaatacttctcccgtctgataatggcgggcaaaggtattgaggaaatctttctctatggcgaaattttccataatttgcgagggaagctccacgaaatcccaatatacattggttccacttaaactcctgtaagtagaattggcaaacataccgtgcagactatgcccgaactcatgcaagaatgtttctacttcattgaaagtcaataaagcgggcttattctcggttggcttggtgaagttcatcacaacggatacatgagggcggctgtttttaccggtctttttatctatccattggtccttataactcgtcatccaggctccggcccgctttcccggacgcggatggaaatcggtgtataagacggctaaaaatttaccgtctttatcaaacacttcaaaggcttctacctctttatggtaaaccggaatttctgtatttttccggaaagtgattccatataacttttctgccaagccaaacacccctttcttcacttgttccagttcgaagtaagggcggagcatttcttcgttgatattgaattttttgtcctttagtttatttgaataataactccagtcccaaggcatgacaacgaaatcagctccctgttcttcgcgagccagttcttgtatctctttatattcttgttgtgcagtaggagtgtatgcttccagcagttggttgagcagcttgtataccgacttgctgttttcagccattcttttctttagcgtatattccgcataatctttgtatcccagtaactgggctattttcatgcgtgtattggctatcttttttacgatgtcgatattattgaattcgttatcgtgtgtacatttggtattataagccatatagagtttttgacgtaaatcccgattgtcagaatacgtcatgaaaggaatatagctcggagcgtgaagtgtgaatgcccatccttctttttcttcgttcttggccgtttctgcagctgcttctatgataatttcaggtagtccggcgaggctctcttttttcgttaacagcatttgataagcattcgtctctttcaggttgttttcactgaaggtaagcgtcaatttactcaattcggtagtcagacgacggtattcttcccgtgcttctccttctaaattggcgccatgacgaataaaactgttatatgcattttccagtaactgtttttgttcctgtgtcagttgcaaagtctctttttggttatacacttccttcatacgtgcgaatagcttttcgttcagtgtgatattattgctgtgttcactaagcaacggcataatcttttgagcgagttcttgtagatcgtcattcgtttctgcgctcaacatattaccgaagacggcaactactttgtcaagtaatttccctgactcttcgaaagcttctatcgtattggtaaaatctgccttttccggattctgtatgatggcctctatttcagcattttgtagcttgattccttcgaggatagcaggctcataatgttcagtttcaatccggtcgaacggcacggcttcgtgcggcgtgtggtattgcccgtagaaaggattctgggcatttgttatattgttcatagtgcaaactagtatcaatgttattaataatctctccatagaattacaaagctactaaaattgtagcttattcaacggataacacgttgctttttaacaatatataaaatgaaatgtataaaaaaaccgctacggtttctcgcagcggtttctatattgttcaggcttctaattaagcgttaactgatgccatgtgagcgatcaagtcaagaactttgttagagtaaccgatttcgttgtcataccaagatacaactttaacgaaagtatcagtcaaagcgatacctgctttagcgtcgaagatagaagtacgagcgtcacccaagaagtcagaagaaactactgcatcttcagtgtaacccaggatacctttcaattcgccttcagaagcttctttcattgcagcgcagatttcagcgtaagtagccggtttagccaagttaactgtcaagtcaactacagatacgtccaaagtcggaacacgcatagacataccagtcaatttgccgttcaatgcagggattactttacctacagctttagcagcaccagtagaagaaggaatgatgttgccagaagcagcacgaccacctctccagtctttcatagaaggaccgtcaactgttttctgagtagcagttgtagagtgaactgtagtcatcaaaccgtcaaggataccgaacttgtcattcaatactttagcgataggagccaaacagttagtagtacaagaagcgttagatacgaattgagtaccttttacatatgttttttcgtttacaccgcaaacgaacatcggagtgtcatctttagaaggagctgacattacaacatattttgcaccagcttcgatgtgagcctgagctttgtctttgctcaagaacaaacctgtagattcaacaacgtattctgcacctacttcattccatttcaagtcagccggatttctttcagctgtgatacggatagcttgaccgttaacgatcagtttgctgttttcaacatctgcttcgatagtaccgttgaactgtccgtgcattgtgtcatacttcagcatgtaagccaagtaatcaaccgggcaaaggtcattgatacctacgatttgaatatcgtttctctccattgcagcgcggaaaacgaaacgtccgatacgtccgaatccattaatacctactttaatcattttgtttaaacttttaagggttttataatatttgttcaaatatctctcgacctgcgcacttgttttattttcaaatgcggtgcaaaattacaaaaatgtttttatattcgcatattaaattcacattaaatattgaaaaaagatgggaaagagcacatttttacaggactttaaggcgtttgctatgaaaggtaacgtcatagacatggctgtcggtgtagttattggtggtgcgtttggaaaaatcgtatcatcattggttgctaatgttattatgcctccgattggtttactggttggcggtgtgaactttacggatttgaaatgggtgatgaaagcggcggagatcggtgctgacggtaaggagatagctccggctgtgacattggattatggtcagtttctgcaagccacctttgattttctgattattgcttttgctatattcttatttatacggttgattacgaaactgacaactaaaaaacaggcagaagtgccagctactcctccggctcctcctgcaccaacgaaggaagaagtcttgttgacggagatacgcgatttgctgaaagaaaagaatagttgattctaattaaaataaaggagattccaagtataaacttgtgaatctcctttatttttctcttcattattaatatagattgcgtacttttttctacttttgcaactcaatttattcaaaatccaaccattgatatgcaggaaaaaataataattcttgatttcggttcgcagacaacacagcttataggccgtcgtgtacgtgaattggatacgtattgtgaaattgttccttataacaaatttcctaaagaagaccctactattaaaggagtcattctctccggaagtcctttctcggtttacgataaagatgctttcaaagtagatttgagtgaaattcgtggtaaatatccgatattgggtatttgttatggtgcacaatttatgtcatacaccaatggcggaaaagtggaaccagccggaacacgcgaatatggacgtgctcacttgacttctttctgcaaagataatgtgctatttaaaggtgtacgtgatggatcgcaggtatggatgagtcatggagatacgattactgctattcctgataatttcaagaaaatagcttcaacagataaagtcgagattgctgcttatcaggtagaaggtgagcaagtgtggggtgttcaattccatccggaagtattccatagtgaagacggaactcaaatcctgaagaactttgtggtagatgtttgcggttgcaaacaagactggtcgccggcttctttcattgaaagtacggttgccgagctgaaagcgcagttgggggatgataaagtcgttctcggtttgagtggcggagttgattcttcagttgcagcagtgttgttaaacaaggctatcggtaagaacttgacttgtatctttgtagatcacggtatgctacgtaagaatgagttcaagaatgtgatgaaggattacgagtgtctcggtctgaatgtgattggcgttgatgccagcgctaagttcttcgcagaactggctggtgtggctgaaccggaaagtaagcgtaagattataggtaagggcttcatcgatgtatttgatgtggaggctcacaagataaaagacgtgaaatggctggcgcagggtaccatttatccggattgtattgagtcattgtctattacgggcacagtgataaagagccatcataatgtaggcggtcttcctgaaaagatgaatctgaagttgtgtgaaccgcttcgtttgttatttaaggatgaagtgcgccgggtaggtcgtgagctgggtatgccggagcatctgattactcgtcatccgttcccgggaccgggactggcagtgcgtattttgggagatattactcctgaaaaagtacgtattctgcaggatgctgacgatatcttcatccagggattgcgtgactggggattgtatgataaagtatggcaggcaggagttatcttgttgccggtacagtctgtgggcgtaatgggagatgaacgtacttatgaaagagcggttgctttgcgtgctgtgacatctacagatgccatgacggctgattgggcacatttaccttatgaatttatgggtaaggtatcgaatgatattattaataaggtgaaaggagtgaaccgtgtaacctatgatatcagttccaagccgccagcaaccattgaatgggaataataacattatccatcataaaaatagcctcaacaggaatttccgttgaggctatttttatgatggatagttttttttttttgattgctcagtccgtatctactcgcttaccagcttttgtgcgtccggaataagaatctctttccggcgtaactctaataatcctttgtcttgtagctcgttgagtgctttcgatgtattcaaccgggtatcatctaagtagcgggcaaggtcgtccatttttactttgaatatcttttctccctgcgccttttcacaatgtaacaggaaaaagcgaatgattttctctcttaaatcctgtgtcggctcttcccataaacgtgagtaaagattttgtgcccggttacttacgatgttcatatagttcagccggaatatttcatatttgaacaggtcgctaagtacgaatgctttgctgatactgacggtatgcgcttccgtatgtgccacataagcagaagtgtaatgggtattcatgccaaacaacgactgtggttccagcagataaggtgcttccatctgttcgatgacggtgtatatattttctttggaacttgtgacgatagaaacctctccttttaataggaagcagagttgtttacacggactaccactctctatgatagtttctcccactttatgcttgataaagtgtagcttgaccttatccagaatacttgtgaaatcttcatgacaaagaccttgaaataaaggcaattggagcaaagtgtcgaacattgtttccatatgttgtaatctcttgttaatcgtacaaatttactcataatacaatactgctgtcaacatctgaccgttctttttgttttttttattgtttgaatgcataaaaatagagtatatttgcagaaaaaaaggagggaattatgttcgcaggcttcaattggcagcagatgattagtgcgtttatcgtactttttgccgtgatagatattatcggctctatacctattataattaacctgaaagaaaaagggaaagatgtgaatgcaatgaaagctactgtcatctcttttgctttgctgatcggatttttctatgcgggagatatgatgctgaaactctttcatgtagatattgaatcgtttgcagtagccggtgcatttgtcattttccttatgtctttggagatgattctggatattgagattttcaagaaccagggtcctatcaaagaagcaactttggtgccgcttgtctttcctctgttggcaggtgccggagctttcaccactttgctttctcttcgggcagaatatgccagtgttaatatcattatagctttagtcttgaatatgatctgggtttactttgtagtgagtatgaccggtcgtgtagaacgtttcctgggaaaaggaggcatctatattattcgtaaattctttggtatcatcttattagctatttctgtgaggttgtttacagccaatataacgttattgattgaggcgttgcatcggtcttgattttcttattaaattgaaagctattgtatcggatgtgccatcgtgttggcacaactgtgacatgtctttgtcgcaatcgtgccactttgatgtcacaagtgtgccaatgtggtggcacgagttggcatttataacgtttcttcttcttctgctgctgttgtttcttcttctgtattttcttcctcttccatttcgtccgcaaaaggttccgggcgttgcggtccgtgatttacgaaaacgaaagcacagagtgtccccataattcctccgctaagatgtccttcccacgacatattggtgggggagaaataaggaaacatatgccatataatccctccatataaaaaggtgacaagtaaagagatggcaatgagtggaatatatttgcggagaataccactgaaaaagagaaagaaggcaagtccgtaaattaatccgctggcaccaatgtgccatcccggttttccaatcaggaaagtaagtagtccgcctccgagccagattaggataaaaatcttacctgctatcccccggtaaaagtaaaaaagacaccatgacaagaaaaataaaggaattgtatttgccagtaaatgactaaatccgctgtgtatcaatgggtgagttaaaatacctaccagcccccgtttctccataggatatacccccaagcgagagaagtcccagtccattccgacttccataatcttgagtatatagagaataaaaataggaaacaaaggctttgctgcagccagcatgatacgctgaatatcttgcttcatgacattcttttctttagatattttacgcaatactacgaatatttgcacaaaatctgaaaataaaaagcctttttatttttgtttttatctataatttgtacatttgggcgttatacccgttgtatatgatgctacagtccatatatgcggtatgtaacaataaatagatatatgatataatgaccaataaattaacctttaataatgcacaactatgagttatttacgatttgacaagaccctcatgacgaatctggaagagtctcttcaaagagaaatcctccggacgaacaaagcaggagcttatcattgtacgacgattgttgattgtaacacacgcaaatatcacggcctgttggtaattccagttcccaatatcgacgatgaaaatcatgtgctgctatcttctcttgatgaaacggtaattcaacacggtgcggagtttaacttgggattgcacaaatatcagggaaacaactttagtcctaacggacacaagtatatccgcgagtttgattgtgagcatatcccggcaacaacttaccgtgtcggaggtgttatcctccgcaaagaaaaaatctttgtacatcatgaaaatagaatcctgattcgttatactttgctggatgcgcattcggctacgactttgcgcttccgcccgttcctcgctttcaggagtgtacgtgagtacacacatgaaaatgcgcaggcaagccgcgagtatcaacttgtggaaaatggtattaaaacctgtatgtatcccggatatccggaactatatatgcagttgaataaaaagtgtgagtttcatttcatgcctgactggtatcggggtattgaatacccgaaagaacaagagcgtgggtatgacttcaatgaagacctttatgttcccggttattttgaggtggatataaagaaaggggagagcatcgtattctctgccggaacttcagaagtgactccccgtagattgaaacaaacatttgaggctgaagtgcttgatcgtacccctcgtgatagcttttaccattgtctgaagaattccgctcatcagttccataaccagcaggaagacgaacattatattcttgccggttatccgtggtttaaatgtcgtgcacgtgatatgttcattgccctgccgggactgacgcttgcgctcgatgaggtcgatcagtttgaggatgtgatgaaaacggcggaaaaggcaattcgcaattttataaatgaagaaccagtaggctacaagatttatgaaatggagcatcctgacgttttgctttgggctgtctgggctttgcagcaatatgcaaaagaaacttcccgtgagcaatgtcgtcagaaatacggagaacttctgaaagatataatggagtttattcgtcagcggaaacatgagaatcttttcttgcatgataatggattactttttgccaacggtacggataaggcgattacatggatgaattctacagtgaacggacatccggtgattcctcgtacggggtatattgttgaatttaatgcgttgtggtataatgcgttgcgttttatagctgatttggtgcgcgaaggaggagacgtatacttggcggatgaactcgatgcgcaggcagaagtaaccggaaagtcttttgtcgaggtattccgtaacgaatatggttatctgcttgattatgtagacggtaatatgatggattggagtgtacgtcctaacatgatatttaccgtagcgtttgattattctcctttggatcgtgcacaaaagaaacaggtgcttgatattgtgaccaaagagctgctcactccgaaaggaattcgttcgttgagtccgaagagtggcggatataatccgaactatgtaggtccgcagatacaacgtgattatgcttatcatcagggaacggcttggccttggttgatggggttctatctggaagcttatcttcgaatttataagatgagcggattgtcattcgttgaacgccaactgattagttatgatgacgaaatgacaagtcattgtgttggttccattcccgagctattcgatgggaacccgcctttcaaaggacgcggcgcagtatcgtttgcgatgaatgtagcagaaatactgcgtgtcttaaagctactgtctaagtattattaaaaaaggaggaacgaagatgaaagttttaatgtttggatgggaattccctcccaaaatatatggtggtcttgcggttgcttcttatggaataactaaaggattgagtctgcaaggtgatatggagacgattttctgtatgcctaaaccgagcggtgaagaagaaaagttcttgaaaataatcggtatgaatcaagtacccatcgtgtggcgtgatgtcaactacgactacttgaagtcccgcttgttggaaatgacaccggaagaatattactctttccgcgatcatatttatgccgatttttcttatatgcatgtgaatgatttggggtgtatggagtttgctggtggttatcccgggaacttgcacgaagaaattaataatttctcgatcattgccggagtagtagcccgtcagcaggagtttgatatcattcatgcgcatgactggctgacttaccctgccggagtacatgccaaaatggttagcggaaagccgctttgcatccatgtgcatgctacggattttgaccgttctcgtggcaaagtcaatcctactgtttattcgattgagaagaatggtatggatcatgccgattgtatcatgtgcgtatccgagcttactcgtcgcactgttattaacgagtatcatcaggaccccagaaaggtatttgccatgcataatgctgtttatccattgtcgcaggaactgctggatattccacgtcccgatcactcaaaagaaaaggtggtcactttccttggacgtattacgatgcagaaaggaccggaatattttgtagaagctgctgcgcttgtattgcagcgtactcgtaatattcgttttgtaatggcggggtcaggcgatatgttgaatgccatgattaacttggttgctgaacgtggtattgccgatcgattccacttcccgggcttcatgaaaggcagacaggtatatgaggtttataagaacagtgatgtatttgtcatgccgtctgtctctgaacctttcggtatcgctccgctggaagccatgcagtgtggaacaccttccatcatttctaagcagtctggatgtggcgagattcttgataaggtgataaaaactgactattgggatattcatgcaatggctgacgctatccattctctgtgtaccaatccgtctcttttcgaatatctcaaagaagagggaaagaaggaagtagatgggattacgtgggaaaaagttggcttgagaatccgtgctctctacgagtctgtgttaagaaactatggtaaataacaaaacaataaataaaatgagaactatctgtctttattttgaaatacatcaaattatccatttgaaacgttatcgtttcttcgatattggtaatgaccattattattatgatgattatgccaacgaaacgggtatgaatgaggtcgctgaacgttcgtatattcctgctctcaatgcgttgatcgagatggcgaaaaactcgggtggtgcttttaaagtagcactttctatctcgggagtagccttggaacaattggaaattcatgctccggcagtcattgatttattgcatcagttaaatgaaactggttgttgtgagttcttatgtgaaccttattcgcatggtttgtcttcactggctaacgaggattgcttccgtgaagaagtacttcgtcaacgtgataagatgaaacagatgtttggcaaagaaccgaaagtgttccgcaactctagtctgatttattctgatgaaattggtggattggtagcttctatgggcttcaaggggatgttgacggaaggtgctaaacatgtgttggggtggaagagtccgcattatgtttatcactgtaatcaagctccaagtcttaagctcttgttgcgggatttcaaactctctgacgacatcagtttgcgcttttctaattcggagtgggcggaatatccgttgtttgctgataagtatattaattggatcgatgcattgccgcaagaagagcaagttattaatatctttatggaattgagttcgcttggtatggctcaaccgttatcctctaatattcttgaattcttaaaagcgttgccggaatgtgcaaaggctaagggaattactttctctacaccgactgaaattgtaacgaagctgaaatcagtatcacaactcaatgttgcatatccgatgtcgtgggtggatgaagagagagatactagttgttggctgggtaatgttatgcaacgcgaggcttttaataaattgtatagtgtagctgaacgtgttcatttgtgtgacgaccgtcgtatcaaacaggattgggattatttgcaggctagcaataacttccgttttatgacaacgaagaataatggtatgtggttgaatcgtggaatctatgattctccttatgatgctttcactaactatatgaatattctgggtgactttatcaaacgggtagatgcactatatcctgccgatgtagacagtgaagaattaaattctttattgactaccattaagaatcagggggatgagattactgaattggaaaagatattggctaaattacaggcaaaagtagaagcggcaaagaaaacggtggtcaaaaaggctactaatgctaaagagccggtagtaaaagaaaaagctgttgataaatcaaaacctgctgtaaagaaagctgcagttaagaaagcaacagccgagccgaagaaggctacggggaaagctaagaaggcttaaataaacagtataaaaacttgttatatagaaccgtgagtaagagaaaatcagactcacggttttttgtgggggtaatgcatatttgtgtggttaccctgtccaatattaataaaaatagcgcaagttacataagtgacctgcgctatttttattaatatggataatctttattttgtactcttgaattgagttgaaactacttctagtttgagaacatatttttgatcatattcatatataggttctcctttttcattatacattatatttccatctttatcttttttaagtactaaattttctcccaattttccaccctttagacgtacatatccaggtttcaaatcatgctgtatgctaataatgttgctagatgttccataataactattactacttgacgaatcataagttactaagacaggaattaatacaactttattccagtcagggttattattttcccatgccttttcatcccacgaactaccagctttttttctagcttcctctttatctacgatacatgcattaatcagctgggttatattgttgaaactatactggttgatattactactgtggcttgttaagtatgatgaaattccatcggttaacttgttttctttaaagaaagaatctttttctttctttcgtattagcataacattagatggaatagacatgccaaattttttgtcagcaggttgattatagtttgtgaatgttaattttacggcattcaatgtgtcaccagctaatacatttgcgatagaatcaataggaagagttgcttgggtaaaaatgcctgccggagtctttagataagttttgtcccagttttcttctaagttgattaaattgtctatcgtttgtgtctcattttttaattgattagcttgaattacttcacgagtagtggcaaaggtacgatatccatagtaggtcgagtctttatattttccatcttcttctgctactttctttttcaatttaataccagtgagtgtatcaactgcatagcatttatacacaacattcatttgagcttggtttatgtaaagcacagtaccatcaccataatcactttttacgtaaatgcctttgaatatttttctgaatgttttattatcaaaattaacgccaaatttgttagcttcttgtataatctttgtgccaatttctattgcagcgtcctgtttaaaagaaacatgtacgctaggtacatatgtactgagtttgcggatagaatctttaacagataaatcgactgctgtataggccttagttcccagtagattttcaggattataaaattcttcaggctcaatatctgtataatatgcattctcttgattaagttctttttcagcctctcctagttcgtaaacacttaaacgacatgcagttaatgaatctccaaaatagctgctataccataggtaaagttcgattgtatggatgttaccaataatcttattttcatcatcacgtatgaaagtgacatctttattatcttcattatcgtcccctaccattatttgagtagctttccctttgctgtctaaagctgtcttattgtatactccagggaaagtcattccttcagggcaatttagttgtgccaagaaacctgcctgataagttccgaatgtttcatcagtgaacttacctacataaccgacatttgtcattgcatatatcttaccggcatgaacagattcggtaattacatcaaatgtagatagctttccattgatatcccggtcgctttctggaaacattctcaatcccagtccggcagtgttgtcatcacaaccccaaaaggtgattgccagtaaaactattaaggcgtattttgctttcatgatcgtcgtatcttgatttttttattcttcttcgtttgcagtagcatcccatacctgatcgtagaactcgttgcaggcatctgcatagttttccgggttttggtagtcaagtaccaatttgccagattggcgggcatattcaataatagactcgtctaccttttcgctgttttgtattactccgtccgaataatcaacggcgagtttgcacagagcagcatagtctaccggctctttcaaatcacctaaatcttttttagaaatacctttcagcatcaatttggctgcgaaatcgtcgctaagtgtactcttgaaatcatcttcataaacagagaataccactttagcgtcgcgaaaagaaggttcgtctttataggctttcttaatataaagaggagctaaagctgtcatccagccatgacagtgaatgacatcaggacaccagcgaagttttttcactgtttccaatacaccgcgtgcatagaaaacggcacggctatcgttatcatcatattctataccattttcatccgttgtctgcatacgattctggaaataatcatcgttatcgatgaaatatacctgcatgcgtgcggattggatagaagcaacttttataatcaaggggtggtcagtatcgtcgataatcaggttcataccagagaggcggatcacttcgtgcagttgatttctgcgctcattgatatttccccatttaggcataaaggttctgatttcacggcctttttcttgtatcgcctgtggaaggtttctacctatattggccatttcggattctgaaacgtaaggtgtaatctcttgagtaataaataaaactttattcgcctttgtcataataacaatagttcactataatattctgcaaagatacgaaaaaaaagacacattaaataagatattctttctttatgtggcaaatattagtttattttgcagagtttttgcaaacgagtaaaacataaaccaattgacgaaaatgaaagtagtgcacactatcaaggacttacaggcagaattggctgtcctaagagcccaaggtaaaaaggtgggactggttcctacaatgggtgctttacatgcgggacatgcatctctggtaaagcgcagcgtaagtgagaatggtgtaactgttgtgagtgtttttgtgaatcccacacagtttaacgataaaaacgacttggagaaatatccgcgtacattggatgcagattgccgtttgttggaagaatgcggggcggatttcgcttttgctccttcagttagcgaaatgtatccggaaccggatacccgtcaatttagctatgcaccattggatacggtgatggaaggtgctttccgtccaggacattttaacggtgtttgccaaattgttagcaagctgtttgatgctgtacagccggatcgtgcatatttcggagagaaagacttccagcagttagcaattattcgtgagatggttcgacaattgaaatataaccttgaaattgtaggttgttcaattgtacgtgaggaagacggactggcattgagtagccggaacaaacgtttatctgcagaagaacgtgaaaatgctttaaatatttctcgcaccttatttaaaagtcgtaactttgcagccactcatacagtgagcgagacgcaaaagatggttgaagatgcgattgaagccgctccgggtttgcgtatggagtattttgagatcgtagacggaaacacattgcagaaaattagtaattgggaagatacttcctacgcagtaggatgcatcacagtgttctgtggagaagtccggctgatcgataacattaaatataaagaataactaaaaagacgaaaccttatgatgattgaagtgttgaagtcgaaaattcattgtgcacgtgtcacggaggcaaatctgaactacatgggtagtatcacgattgatgaagacctgttggatgctgcaaacatgattccgggagagaaagtgtatatcgctgataataacaacggtgaacgctttgaaacctacattatcaaaggtgaacgcggttcgggcaaaatttgtctgaatggtgctgctgcccgcaaggtgcaacccgatgatattgtgataatcatgtcctatgcattgatggattttgaggaagccaagtcgtttaaaccggctgtaattttccctgatcctgcgacgaacaaagtggtaaagtagaaagtatctttgatatttgaaatgagaaaagccccgtttacagttcgtaaacggggcttttcttattctacttttttatgccgggggtgatcgatgttctacccacgtgtgagttggttttagcccgggtgttaataagcggcagttagttgccggcgtttgttttcagttgctcattcatagcagcggcagctttacggccatcacccatcgccagaattacagtagctccaccgcgaacgatgtcgccacctgcgtaaatcatcgggatagaagattccatgttgtcatttactgcgatagttcctttccgtcctaattccagtcctttgatagagcttggaacaatcgggttaggagataccccaacgctgacaatggccagatctatgtcaattgtttctgttgctcccgggatggctacaggactacgacgtccggaagcatccggttcgcctaattccatcttttgcagaataacttgttttacgcaaccttgttcatcagcaatatattcgataggattatgcagagtgaggaattcaaccccttcttctttggcgtgttttacttcttcgatacgtgcaggcatttcttcttccgagcgacgatagataataatagcacgttcagcgccaagacgttttgccgtacggacagagtccatagctgtgttgccaccaccgattactgccacattcttaccgaatgctaccggagtgtccgaatcttcgctggcggcatccatcaaattgacacgggtgaggtattcatttgaagacatgatattgatagagttctctcccgggatattcataaagtttggcagtccggcaccggaagccacgaatattcctttgaaaccttccgctttcaagtcttctacaccgatagtctttcctacaatacagtctttgatgaaattaacgcccatcttaccgagattgttgatttctacgtctacaatcttgtttggcaaacggaattcggggataccgtatttcaatacaccgccaatttcatgcaacgcttcgaatacagttacatcatatccatatttagccatatctccggcaaatgccaatcctgcaggtcctgaaccgataacagctattttgatgccgtttttctctgcaatgacaggtacggagatttgtccgctttcacgttcgtaatcagctgcaaaacgctccaaataaccgatagctaccggcttttcattcattttcagatgaatacattttgattcgcactgtttttcttgcggacacacacggccgcaaactgcagggagcgcacttgtttctttcaatgttttagcagcttcgaggaactcaccgcgttcgatattcttaatgaagcggggaatatcaatacctaccggacagccttccatacatccaggattagcacagtcgagacagcgtttggcttctgtaacagcctgttctgctgttaatccttgattaacttcctctttacggctgtgtgaacggtattcagcatcgagttcattcatctctacacgaggaatagccgtacgttcttttggcttcatggatttgcgtaactcctgcctccaagcagcattacgacttttttcatcgatttctttggttgcttcacattccgattccagcttatgcatttcttcgcgttcgatattcttgaacgcacccatacgtttcagcatttcgtcgaaattcacctggtgaccgtcgaattccggaccatctacacaaacgaatttagtctttcctcctacagtgatacggcaagcgccgcacataccagttccgtccaccatgatagtgtttagcgaaacatctgtcggaatttcatattttttagtcagcaagcaaacgaatttcatcatgatggcagggccaatagcgaaacatttgtctactttctcacgtttgataacttcttctacaccttctgtcaccagacctttccggccgtaagaaccgtcatccgtcatgataattacttcgtcagagctttcacgcatttctttttccaagatgatgagatctttattgcgtccagccaatacagtgataacacggttaccggcagccttcaaagcctgtacgataggaagcatcggagccacacctacaccaccaccagcgcagattactgttccgaatttttctatatgggtagcttgtccgagtgggcctactacgtcagtgatagattcgccttcattcagctcgcagagacgggtagaagaaagcccgacttcctgcactaccagagtaatggtaccctttttcaggtcggaacctgcgatagtcaatggcatacgttctcctttttcgcctacacgtacgatgacgaagtgtccggccttacgagatttagcaattaaaggagcttcaatttcaaatttgaatactttttcagaaaagcgttccttgctaatgattttgttcattatctaattaatttgttgtttttattacgtaactgctatcagaatgatataaattttggcaaagatacagcttatttgcgaaatataaaagaaaagccactcttttgatgagtggctctctatataagggtgcttttattagtctgtcagatcaagtcttagtctatcatgtcgaagccgcagtacggaaccaacgctttcggaattctaatgccttccggagtctggttgttttcgagtagggcagcaacgatacgtggcagtgctaatgctgaaccgttcagtgtgtggcagagttcggttttcttttctgcattacggtaacggcatttcagacgattggcctgataggtatcgaaattggatacggaacttacttccaaccagcgtttctgtgcctctgaatatacttcgaagtcgaaacaaagggcagcagtgaaactcatatcaccaccacagaggcggaggatacgatatggaagttccagtttttgcaacagaccttctacgtggtctagcatttcctgatgagattgtttggagtgttccggtttgtcaatgcgaaccaattctactttggagaattcgtgcagacgattcagtccgcgcacatctttaccataggaaccagcttcacgacggaaacattgtgtataggcgcaattcattattggcaactgtttttcttccaaaattacatcacggtagatgttggttacaggcacttctgctgtcggaatcagatataaatcatctacttcgcaatgatacatttgtccttctttgtcaggaagctgtcctgtgccatagccggaagctgcgttaactactgtcggtggcatgatttcagtatatccggatttgcgtgcttcgtccaggaagaagttgataagagcgcgttgaagttgtgcgcctttacctttatatacagggaaacctgcacctgtgatttttacacccaggtcgaagtctgttaaatcatatttcttagccagttcccagtgggggagtgcatctttaggaagttcagtttccatacctcccattttttccactacgttatcttcagcgcctacaccttcgggtacgctgtcgtaaggaatgttggggatggtgtaaagtacattctgcatatctgttgcagcctgtgtcatagcggcgtctaattctttgttaccttcttttagttcggcaacgcgtgcgcgtgcagtctcagcttcctctttcttgccttctttcatcagttgaccgatggtgcgtgaaagcgagttaacctctgccagattcttatctaattcattttgtgtgctacgtctcttgtcgttaagagcgatcacttgatcgatcgtttcctttgcatttttgaaatgcttcttttccagtccgcggagtaccgcctctgtgttttctgtaatttgtttaatggtaagcatatctatactttttatgaactttcttatttaaggctacaaagataaagaaaaaacgaataatcaagcaaatatatgtgttatatataatatatatgatgtgtctatgatatatataatacatgtattgagctgtataataaacatatatgcagtgaatgatacatacatgtctcttttagagtgatatataaaactctggttgttaaaaagaaagaggttgtgtcaaaacgttggcacaacctcttttatattttacagttctgctatattttcttttggctatgctgctttttcctcatgcatttggcaacaagttgctatattccaattatatcgggttataaatagtcccataaacatatatttggcaactgtaatgagcccctttccttcttttatcagtttagcacacatttttttgatattaaaggctatagcaaagaaagcaaagtccattgtaaccttgtcttctcccacatgccggaatcttctgtatgccatgttgtatttcatttgtccaaacacagcctctggttctatacacctcctgcctctatgcttgataccttcttctgagagcaacctttcccgtgcctgccgtttgtattgatttaatcggtggttgacttctataatacggttcccccaagctttaaaacaactgccacgcaaagggcaaccttcgcatctttttgctttataccgggcactttcgatgatgtatccgctcgctgtcttgtcacgtttggttcctatacggttcatgtgctgtcccataggacaaacgtaataatcctcttgggcattgtaatggagactttcggcatggaatgggttgggagtataacgaggacgctgttctttatggaagtaattgtacttgatgaaggcttctatcccattctcctgcatgaaccggtaattttcttccgaaccgtaaccggagtctgccacacagatattcggtaaacggttatagcggtactggaaagagtggaaaaaaggtatgagggtcagtgtatcggtagggttgggaaacagacggaagtctgtgatgaattggttttcagtacctatttgcagattatatccgggtttggtctgcccgttcttcatggcatcttctttcatgcgcatgaatgtggcaccaggatcggtcttggaataggagttacgttctccaagggtatcaaggtgattgtcgtattctatcagcttgtcacgatacccttcaagttccatgacctgcttcttctttttgcgcagggctttcttttcttccttatcctttgttgcaggctggcgttccagggcttctttaagttcatccactatgtcagagagcctgcagggagtaaactccacggatgtgtcttttatagagttctcctgtgcaatggcttcatccacctgttccaagagaatacggattttatccattagtctcgtacggttccgttcgactgtcttgcgccagacaaaagtatatttgttggctttggattcaatcttggtgccgtcgatatactccacatcaaggctgatgaaacctttatcggcaaggacaagaaccaactgggtaaatacattatttatttcctcctttacacggttacgaaaacggttgatcgtgataaaatccggatgctcattaccggcaagccaaatataatgaatgtcacgaaggaggtgcttctctattttacggcaagaatagatattattcatgtaggcgtagattatcaccttaagcatcattttaggatgataaggacaacggcccgtttccttataaagcttcttgaaactctcaagattgagattgtcaataacagcattcacgatgcggaccgggtcggtcgcagctatgttttcatcaattctttgtggaaaaagaacggtttggttgggaatgtaaggacgaaaatgtaactttgccataacgaaaaactttatacctaaagatacgaaaactttgggtaataacaaagcccgggcttgagaaagtctgggctttgcgcataaaaaaaggctgtgtcagcgttttgacacaacctcttctcttaaatattttcagttgtgtaattatgcctcagtagcaggaacaacagaaacatatcttctgtcttctttgccaactttgaagctaactgtaccatctactaaagcgaaaagagtgtggtctttacccattccgatgttttcacccgggtggaattcagtacctctttgacgaacgatgatgttacctgctttgcaagcttcgccaccaaatatcttaacgcctaatcttttactttgtgattcgcggccgttcttagaactaccgacacctttcttatgtgccatttcttcttactttttaattgattaagctactacttctgtaattgttaattcagtgaactgttgacggtgaccgttcagttttctgtgtccttttcttcttttcttgtggaaaacaagaactttgtcgcctttaaccaagtttgaaacaacctggcaaacaactttagcgccttctacggtaggagcacctactgttacgtttccgtctttgtctaccaaaagaactttttcaaattctactgttgaaccgttttctgcaccttcgatgtggtgaacgaacaacttttgaccagcttctgctttaaattgctgaccgttaatctctacaattgcgtacatcttatatataaatgtataagttagctccggcgggtggtctttaatcacttaaagaactctttatcgaacccgttgcggaataatcgggcacaaaagtactatttttattcgttcccgacaaatatttcttttattttttataggagataaaatgattacggcaaataaatgagcattttagctctcattgtagcctattggactaattctcctaaattctgcataatgattttgtgtggataaacacgaagttcctctcccgttgtcattccgttcagcacacctgcaaaatcgactcctgcattctgcgctgtttcggcatctacggtgctatctccaatatacaatgtctcttcggggctacttcccagatgttccaatgcaaatttaactccttccggcgaaggtttcggtgcttttacatcttctcctcccactactatatcaagaaaatctttaggcagaaattcttccagataactcaatatccggaaacgatacttggtagagataattccgacgcgggcaccccgtttcttcaattctttcagtgtagacaatgtgtcgggaaaaagacgggtatttacattcatgtgtacatcagcttccagtctgtactcctgccggaaggcctccagctgtgccgggttggtaattccggtaaggatactgaatgattcttccaatgttttgccgattgtacgcttgatagcttcatcagtaacggttaaatactgatgccgggtaagcacaattctgaaacacttaacgataccacgcgacgaatcggctagtgtgtagtcgaaatcgaataaataggttttgtagttcattggggaaaacttttccgcaaaagtactaaatacttttcttatttcacagcttctactgtgtatccttgtctttttagtaagtttaataatcttttttctccggggaggtgcagggcgcctactgcaacaaaagtcggggcagccttcatgattgccggtagtttttcagcccatgctttattacggttgtaaatcatggtatcttcttcgccgggaagtgcgtcacattgatcgcctttacgctcttcgctgattttaagcatggtgttcagatcttggttcatgtaggcgtttgtgagctttttcaggttttctacttcagtctctatatggttaagagtgcacattaatagttgtgcttgccgttgtagtgaactgccattgaaaagcaggttgaattggaattctgcagtttccagtccgtccaccttttttccgttttggatggcttgactttgaaagaatgtgtcgagttgctcttgcgggttgaatttccctatatgttttacgtaagccatcaccactacattatttaataagaaggcaggttttagcttcggagccatatttaaatctaccatcaggttttctttgcagaatttattagcagtctcaaagtctttcggagaaaggagagagtttagcgtggtatcactttcaatcatcattgccttttgcatcttttccatggtggcaggcgattgcatttccgacatttttatctctccatatacttgttgagtttcattcatagcctttttaagtccggcaatgctatccatgatgctgaacggtgctagatggtgagtgcctatgatgtaggaaggttggttcagtccgttgccggacactttccataaaagctgtgcattggcgctgaatgccacgcaaataaatagaactgctccgatgaatgatttcataattttatatcattagaagttgataattaacgtatcctgccgccgcttatccagtgtttggtataatagttttcgttcaagttgctgacgatcactcctttactggtgctggaatgaataaacttaccgtttttgaggtaaatgcctacatgagctactttattttttgaacgactgctggtgaagaataccaagtctccttcccggagattccgtttggcgactttattgctttctttttttagatcttccgtgttacgcggcacttgggtgcggtataccttacggtacacttgataaactaatcccgaacagtcggctcctcgtttcgaatcacctccaccacgatagggaacccctatccagtcggctgcttccagatagagcttatggttatcctccatattaatatctacccccaacaatatagaagctcgtgccaatgcttgataatccagccggggtgcggaagtgcggcaggaactaaggctggcaatcagtcctaataaaaggatgaattgcaggaagtatcttttctttctatcaggtttctttatactagacttatgggtatcagacttttctgttatatatctcatcataattagtttatgcaataattttagtaaggatggatacttaccattcattattttatcatttcctatttaccgtttactcttcttctacattaaaataatcctccagttctttctctgcggagttgtcctcgttgataatatcccggatgatgacaccgtgttccaataaaacaatcctcggacatacatctacggtatgattgagattgtgactggatatgataaccgtagcttgatgctcctcattatatttcttgagcagatgtttgatgatagactgagaacttggatcgagaaagttgaatggttcgtccagtatcagtaattgcgggtaatgaagcatggcagaaataattccgatcttttgcttgttacctgcggagtagttacggattagcttcttgtgcccgatcacttctccactcataaaacgttcgaaaggaatcagacgttcgtccacttcttctttctttagtccgtacatctttccgatgaaatagaaatattcttccggagtgagataatcaatcagaaaaccatcgtcaatgaaagcaccggtaatgcttttccagtcttcgctttggctgacatcaatatcattaataatcaccttaccatcgtctgcttttaacagatccagcatgattcggaagagagttgttttaccggcaccgttgtttcccaccaatccgagcatatcgccttgattgatttcgtagtgttctatgtctacggcaatcttctcaccgaaattctttttaagtttgtcaatgataatcatgatcttcaatgtttatatggttaatgattcatgagcgtttattggcggctgtctctgaagccttccatgttttcgtatcgccgtttcatgaaacgatgatatacatttttaatccataaaggagaagtcagggtaaatccgagaccgacaactaacagaataatgtaagtgattgtttcacctaaaaatgcatttaatagactgtataagatgagaggcacaccgaaagcagcgaaattaaccaccatctgtatagcgctattcgtttgtcggcttgccactttctcgtttaaggggaccgtctgtttgttgtagacagccagttggaaaaaacagaaataaataaagccgatggtatagaaaaaccaggcgaaggcgcccagtaaagtgagtttattcatgatgatggcgggaatcatgagtatgaaaggtatgatttcgccaatgctgtatgtgtaatatttggctttcagtagactcataattgattctttacgagacatcaggccatcaatgtaattaccttcgaatgacataatctgtgaaaggataatcattccgaatacggcaaagttgtatacacagatgaaagaagtcatgaaattcccgtcgtagacactggaaaagctaagtgcgacggagaaagccaccactacaattgcgatattgcgtaatgcacctttgcagcggcggttgcgtaaaagcattttcagttccagcctcatatattcgccaacttccccgtagcgttcgaagaatttatattcggagacatgtttaatctgactatcttctacttttgccagctctgcatagataagtccggacatgatcttgcggttaatcaaccataaaatggcaatcacaagtatggtgccgagaaaatagagaatgttgccctgtatgtatccgtctcccagatccatgaagaaatagaagagaggactatcttcgggaataaaaagaaggcagcctattccaccgtagaaagcaataggtaatagaatccaccaaatacgttcgttgataagagtgcggcaaagcaagtaccagtaattattggcaataatcaatagcaagataccgataagataggtgatgacatcggggataccgaaaaacttggtaatagtgatgaaggaaaaagggacaaacagaaacaaccagaacaggttgaacaggcttagtcccgagcggattagtaaaaagtcgatgacacgaattcgtttaaccggcagcaggaggtaaggttttacctcctgcgtcggtgttttttgaaacggaacacgcaacagaaagtccagtgccaggataaagatcagaaccactgcgttcatcacatgatatggttcccggttgggaaccatatcagaaaatccgaacgcgaacgtcgtaccgaagaatatcaggtaaccagcccagaatgcgcccatgacataaccgagtattttagcaactttgttcttttcatacatcggatgccgtttggcggcaagccttccatgtttgcgtaattcgttgaatatcatcattcggtagatatactagagaatttttatttgttttcttccggcacggtcatgatgacttgaatttcgttgttctgtttcagcaatttggcgaggaagtcttgcacttctttcgctgtaatgctgttgaccaacttttcatagtcttttgtattatctacacccgtgtagaggtattcgtccatattattaagccagtagccgttttctttctgggcgtctttatacttcttcagcatatattctttgatcttctgcatgtgttcggcagacggaccttcttttgccattttgtgaagttgttctacaacaacagcagacaatttatctttcttggcagggtcagtttggaatacaatctgaagaacaagttcctctttcgggtatttaccaagacttccgttacagcttacaccgtatgtacctccttctttttcacggatttcagcagtgtaaaccaaatccagagcctgatctaagaagctaagcaggacattgttgcgcaagtcatatttgcaagtgccgctataaaggaacatgatggtagccatcggagtttcctgtgctttcgcaaatacatttttgatctctcccttgcggatgtccatcttgttatctttgaaagtctctttacggttgatagatggcagacctcccagatatttggcgattaacggtttcattgtagccaagtctacgtttcctaccaggaagaaagtgaaatcacttgcatctttgtagcggtctttgtacatttcaagaatacggtcatagttgatctggtctaccatgttttctttcattctgatagcgcgtggatggtgaccgtatagtacgcttgtaatagtgtcactgaaagcagtcatcgggttagcgtctgcattttgaagttcagctttcaaacggttcttgtaagattcgaatgcttcgttatccttacgcggagatgtgaaagtcagataagtaagctgcatcattgtctcaaagtctttcggagcacagctaccggaaacagtttccgtagtgttgccgatacccgcacctacgtttgcacgtttgccagccaaagctttacccagatctactttgctgaaattaccgattccacctactagagctactccgtttaattgagagatattgataatttcttcgttcgggaatacgctggtaccaccgaagcttacacctttcattacaatctggtcagccttgaaatcagttggtttcacatatacggttacgccgttggaaagtaccaacttagttgtaccatagatttcgccagctttttcagaaacaatcttaccgcctttaatatcttcagagatcagcggttcgttagaaactttatcttcataaggtttcagatcgaatgacttcatttgtttcaataaagcagcaatttcttctttagtagggtattttgctccttctttttccggaccggccagcaaaaccacctgattgttgtcagtgattagttgttgcatcacctgattgacagcttctacagggatattcggagccagtttgtttaccagtgtatattcaacttcaattcccggaatcggttctttttcaaggaaattgttaacgtattcgttgacgtaagaaccacttttagtcttttcacgttcgttgtaagcagattctacggcttgcaaatagttggcgcgtgcgcgttcatattctgaagcggtaaatccgaagcggcgtgcacgttccgcttcttccaaaacagttttcattgctaaatcgataccgtctattttgctgcttgcatcaagtgcgagtgcttctttagtcttggcaaggaaatagtttccatattctgcgcttgcactagtgaaaggaggattagcggtttgacggagttcgttcaaacggttgttcagcatattcatagccatgctgaccatatactgagtagcataataagcaatggtgtttttcaaagaatccggtgtagcgtcttgtttgaagaagatgttcacataaggattcttcacttccttgtctgtaccgatatagataagcggttcctgattatctgccactggatagtagatacgttcggccgggtttaccggagcttttacatctgcaaatacctttttcagtttagcttcaatttcatctacattgatatcacctacaataacgattccttgtaagtccggacgataccatttcgcataataatcgcggatatcctgataagggaagttgttgataacatcaatacttccgataggcatacagtctgaatatttagaatccggatacagagtcgactgtgcatcagtcatgatgcgaagcataccactgttgcggcttctccattcttcgcggataacaccacgctctttgtcaatttccttgtcggcaaggttgatagcgttcgaccagtcgtgaaggatcagcagacaagagtctaccacgtttatattttcagttggtacgttgctgatgttgtacaccgtctggtcgacactggtatatgcattcaggttcgtgccgaatttgataccttttgtttcacaccagggcacgatgccaagtccggtttcatcacctgggaagtgctttgttccgttgaaagccatgtgctccagaaagtgtgccagaccacgttgttgtggttcctcaagaatggaacctactttctgggcgatgtagaattcaactcgtttttcgggaagggcgttgtggcgaatgtaataggtaagcccgttgtctagtttaccgatacgaacattcttgtccacaggtaactcttgcatgggttgtgcaagtgcgagctggaaattgcagcatataaaaaggactgcaataaataatccacgtaataaatgtttcatgttctatttagtttaaataaatatttctgtgttatttgtcgttgtgcttggttgtaaatcacaaatagacagggaaaagagttattttatagcttcccgtatcctgactagcttagttaacagtccttccagaaggtctaactttaacatattggcaccatcgcttttggctacggcagggttttcatgtgtttcgatgaatattccgtcggcacctacggcgatacctgctttggcgacagtctctatcaactgcggcattcctcctgttaccccactggtttggttgggttgctgcaaggagtgagtgacatccagaatcaccggatagccaaatgactgcatttcggggataccacggtagtctacaacaagatcttgatagccgaaagttgttccacgttcggtaagcatcacattcttgtttccggcttccaccactttgtcggcagcaaactgcattgcctgcggtgaaaggaactgtcctttcttgatgttaatcgtttttccggttttggctgcggcaaccaacaagtcggtctggcgacaaagaaaagccgggatttgaagtatgtccacgtattcggctgccattgcagcttcatctgcggtatggatatcggttacggtggggactccgaaagtctcatgtacctttctcaatactttgagtgctttctcatcgccaatgccggtaaacgaatccagacgtgagcggtttgccttacggtaagaacctttgaatacataaggtatttgcagtgcttcggtgatctttactactcgttcggcaatgcgcattgccatttcttcaccttctatcacacacggaccggccaacaggaaaaagttgccggtggggttgttcttaagttctatcattttattatttaccaattacaaattatcaattagattgtgagtatatgtctctctccttggggggagtgatcctgattagttggggatgataagcgttgtcttttccgggagcacgcctacttctaaaggaaaatgtttaggcaacaaacgcccgtccaaatccaccgctgcattctgtgcccggagtacctttacttttctcgtccggtagcttttcaccactttgtgattcaggattcttccctgaatcagcatccatagtccggaaataatttgcaggaattccgggcggtagattacagatacatccagccatccgttgtatggaacggcactgggagtttgtccccatccccaggcactgcctatacatacggtcatgatgcgtccacggatatgttcatcattgatgcggagatgcattctgtagagcttccgttcgaaaatgagggagaacagggcagcaacgtatgaaaggaacttcaccccccagaaacgtttggtctgatcggtgattttaacgattcgtgctcccagtccgatattaacggcattgaggaaatagcgacgctggtgttcgtttccgtcgtagaagttgcagtagcctacatctattttcttcaaccgatgattgatgatacagtcgacagccggcttgtattcggtgctaagtccccaatatttggcgaagtcatttccgataccgttcggaatcatgccgagggcgatgttctctttgtcttcggcatcggatagcataatgccattgatggcatcgttcaatgccccatcacctcccacaatgacaatcgtgcgataaccattgttggccaaaattttagcgagacgctctaccgaaccgaaaccttcggattgtacatagtcatagtctacacctttactgtccatgtactccttaatttctttccagcgcttctttacctttcgggtaccagcttttgggttgtaaatcactccccatttcttcggttctacactcatatttgtttatctatcctattgtgtattaaaaatcgcactataataactgccaaagatactaattcccttgcagtttctcttttacaaaagctatcttttcttccattggcagctctgcattcatccaatggatcgtaaatcctcttctttccatgccgcggaaccaggtcatttgtcgcttggcaaactgatggatggctatctccaaaccattgaacatttcttcataagtcagtttgcctatgacgtataatgtcaggtatttgtattccagtccatagtagatgagatcgtccggtgtaattccctgttcgatcaatcgtcttacctcgtccaccattccttcatccaatcgttgtttcaatcggtgggtgatcttttcacggcgcagttcccggtcaatgtccactccgatgatgagactgttcagttccggaaattctctttcgggaaccggatgggctgcataatactcttcaatttctatcgcacgtatcgcccgttttacggtatccacatcggtagagttatgcaaaaccttgtattgacttagcatttccgtcaactcttccagcgaatgatttgccaaacggttgcgtaattcctgattttccggtacgggcatcagtttatatcctttcaacacggattccagatacatacctgtccctccacataaaacgggaagacagcctttttgtttgatgctttcgtaagaattcaagaaatcacgttgatattcaaacacattgtatttatatccggggtctgcgatgtcaatcagatgataggggattgtacgtccgtttacggtatagtcggccaaatcttttcctgtaccgagatccattcctctatatatctgacgggaatcggcactgataatttctgtgttgagttcataggccaaggcagcggcaaagggagttttacccgaggctgtaggtccgagtatggcgattaaatcatagtccggcatagcttcattcttttatatctgcaaaattacgaaatatttttaacctgtttggtattcaatcgcttttttatcaagattaataagggggatagggaaggttaatttgtattttaacctctaattggtggtattcaatctaataataatgaagtgtatgagaataccgccatctgatattatctactatgatatttgtgttgtttttattgtcaatctgtcatgatagtagctaatcttttgatttttagtggaatatggctgatgataggagctgacaataggctgacaataaaggtcttgtttttttattgtcagctttgtttttgctgattaaatagtgtaactatttgataaacagttgtttatctccttttttatcatgatgctatttttgtgataacttctgtatatctgtatgtttttacgttatattaccactaaggttgtgttgaaaaatcaggtgtgataactctagtatgctgatagaataacacggagatacgggtaaagtagcttaaagatactggcattgttcagctagagtgcctttattgttctgctagagtaccgttcttgttagttctccacggccgtggtagcttcttcccacagtcgtggtagcttcttctcacggccgtgggaagatctcaccacggccgtggtgaatgaatgatatcggtagcttaacagatgtatacctgcttgatagaataaagataaaggtgccttaatagagttgtgcttacttgcgtaagtctataaacctagcattcaaaatcatttccacatttatctgttgtttattgtctgtatgattcggcatacctttccgtttttatccacaccttctatggttatatcttccggtgcagtgctgtccggagtatagtattcgatagttgcttttccattggcatccagttgaagggtaggattccaatagatcgtacttcgtaaatccgagcgttggtcattctttttttcgggcgtatcataagtcggatggtagaattcgaccgagtcgctgtaccctagtggagtgcacgtgataataccttgtgccggtcttgccgggatatctttgccgtctttcagcgtaataacgatagcacctgccgaaccgcgggaacctaagatcgctgcatcggcaccgcgaagaaggctcaagctcgacatatcactggtttgtatcatggtcaagatgtcgttatcgtcttcatacaccacgtcgtcaacaacaatgacaggttgctcgggattgttgcggatatgtatttcatttccgtttgtcacgctaatgcccggaagtctggtaactgcatcaaaagctgtttgcgcaccgaatccttccagtctgtccccttcgatcgtgtaggtgttgatacctcctgtgtaaatactttctgaactggcctttttacgacttccagtgactaccacttctttcagattgtacactctcattccacctttcatgtaatattggtcgcgggtgttgagcaaataatcttccataaacgttgctgttccatcatggaaaggagacttgtgcgaagttgccgggtattgaggagtgtcaatcacgatgtccactccggcaaatcctcttttggtacgtgcctgaacaaggaaagtcgtgctatctctgaaagatgtgttcacgataaactctcctttttcgtctgtggtggtagtggcgatgatgttctgtttgggagccagaatacaaataggtcctttcttaacgttacctccaaagaaacctttgatacgtccgctgatagtttgccccttttccatatagttggtgaggttcattgaaggtgcagtcagtacattctggatatggtgtctgcgccatccgtgcgtcatcatcaggaagtctaccgtgcggagagtccggaggtcttgctgcaaaaaataatatccgggattttctacatatccttttaagtcggaggtcaatagaaaattcgatacgatattgtcagcaagcgaatccgggcggatactctttctgtcggtaatgctgatggaaaaactaccttctaccggagtaccgttatcgtcttttgctgaaatttgcagggataccttttctctttttccgtatgtcggcttatctgcaagaatttgccattgatgcggattccggtcgggtatgaaaaccaggcattcgctaagtgcgttgccctgttggtcgatcagcatgaaatgggtgatgcctgcgttgaataaactgtcgttcattcttccaaaagtcctgtcgatactgactggctgcaggatgaccagctttccacgagtgtgcgcaatcaagaataacttttgaggccattcggtagcttctgttttctggatttcgtaacggatttcctttttataatgtgtcatggaaagtgtgattcctttttcttctacagctgggaggtcgaatcgtttactgataccgtcaccggatttggcaatcacatagtaagagtttcccacagtcggattcagtgtgaaaactcccatgccgtcatgctccgagcggaaagctgtcaatgtgtctccgttggcatcgaacaggaatccttctatttctgtagaaaagccatccgatccttgagccttgaaagctatattctgatgagcaacggtcaggagagcacctccttccgggaagaacttaacatcaaagtcttttgtaaacgaaggcagatagaaagtctttttataaatatattggggatcatcgaactctacttcaatgtggcgtgtggcaataggcttcaaatccggcagggaaatagaaatcaacccattctcgtctgtctttcttttacctttatctttaatctttccgttttcaatgtagcggtagcggatggcagtatttccgaaagcctcttgggtattgctggtaaatcttaccttggctgtataatgtgattcgtcttcttgctgatactcaatatttgaaacaatcgtattatcaatcgaattaccgattttcagattgcgtgaataaaagaattccggttcctgattaagcatccagttgctatatccccgcaaataataatcacctgcagggagagtgggagggagggtgaaagcattatgaaaacccaatgaatctctacggatctttttccgttctacaatagagtcggaacggttgacaagctctgtaatgatgaagttgctttgtgtattatcttgatgtgtaacagagtttaccagatatcccttgaaccatattttttctcctgccccataaaagggcttgtccagatgtaagtagagtttctcctgtgggactttttccagtagattaaaatacgcaataattgtatcttgtacgttttgccctgacaatggggcaaaacagaacagtattccgaaaaagaaagctattaagcctctatggatagaaaatgtagttttgtttttcatacgttatgtgtttgattctacatctatgatttgtgcatccagatcgaaagcactttcttttttactgccagtatgttaatcaccgatacaacgataaataatagaatacccatactgattgctgcccataatgatccggtttccagctgtggaaataggatgcggatactgtctatgtaataactgcgcaaccaggagactaatccgatggataatacaagcacaataacgttcaatcctaccgtgagcaactgataaggcaatgctaccttgttgggactgtatccgattagtaatagactttccagcttggttgtattcttttgtaaaagcaggaagatgctcaacatcagtatatagaatgaaaggatactgataaataaacccactcccaatacaatacctacgataagacggaggaaataagttgtttttccggcatccagcttaccatcttccgtttcatatcctttcttctgaaaataactggcgatggcggaatctgccggattgctaacctcgataatcaatcgtgccggttgggcttctgcattcggtgcgaaattctcattagcccatttcataaaggactggggaacaagaatcgtattcagacgattggagaaaccgacaatgtttcctttgtactgttccacccgtccgttgccacgcatcataatgtccatttgaatcagactcattaacccttccgatagtttggggaggctgcggctttgcgcaaaaccgaagttataaaggttcagatagttgcgcggaatgataatgggtatggtatgtgtgtgttcatcgaaatgccatttatcgagtttgatgtcgacaaactcatcgggaacagactcaaaaaacatatctgtggaaagatgaataccggcttccttcattcccaatcctgctgaaactttgaattgagaaggagtgaaagctcctattgttttggtaaacggttgctttttcagatccgcaatttcttcggcagagaatgtattactctttcctgcaaaagaaccgagagcactgattttctttgtagctatgatgaaatcctttttcataaagctgtctccttcggtgaataccggaatgacatctttataaaactgtacgctaagcaatacaatcatcatgccgaataggttggctaaaaagaaaccggctaattgaccgatactgatatgttggcggagaagcttccagacaagagttggcattttatttacgattttacaatttacgatttacgatttgaaatgatgctgtgaaaagaggttgtttattacctgctacctgttattaaccagcttactacagttgaagtgtatggttgtaaggcaactcgatatgtttaccgatggaagtggcgatcactccggctccttgtgcctttgcttcggcgatgataagttcacccatgatgcggctgttatcatcgtccaggtggctgatcggttcatccagaaataaaaagtcgaacggctggcagagcgcccggataaaggcgacgcgctgttgctgtccgaaagatagcttgccggctttcacatttattttatctgcgatccccagttgttcgaagaacgataagatttcttttttctttttgcatccggtgaggttattcttcaattgcacattttcaagagcgctaagttcggtgaagatgcgtaaatcttgaaaaagcatacttagtgaatgctttcgcaggtcgacccattgcttcacggagtatgctttgatattggtttcatcgaaattaataatcccctgatagtcgttgcggtagccatagatatagctgcacaacgaagatttgccggtgccggaagcagcttcaatcagatacatttctcctttccggaagaaaagatcctgatgccatacgtccgaagtcaccgaattacggtcagcaaacacttggggaagtgtttgctgtaagtgaatgctattcataccgttggtttatacatttattacatgccggcaaattgcttggcaaagtctacaatttgtttgagggcatttacatctttgtctttcaggcagaggtcgatctcgctgactttcccttccgaactcatggacaggtaagaaaccttgttggccagttcgatatatgtcttagcttcctgtcctccgaaacctgctaccattttaacgataggcagatcgaggattgcttcggcattgattgctataaataggctctttcccttcatatccgatgcataaggagcatctttgactgatttgtcggcagctttacctacgtttttgtagagtaactcatcattggttgcatacatttgtttatccttgatgccgaagaatatattcatgcctcttgtcttgtagacatattcgtctttgccaagttgcatgatatcttcccctctcttcaatcccaatgattccttgttcttgtaaatcatttcaagagcattgccgttcttcacgtcagcgtacatcatgaaagtgggagcactgctcatcgttacgttgattaatcctgcagaaatatcaccattgaacgagctgaacaactcttttacttcgtctgccttagcgatagatactgtgttgcggaattccttgttttcgctcaacaggttatacagttcgcctccttttacacctacgttgaagaacatcagggtagaagccgggaagtatttaacgaaagtattgttcgcttttccaacagattccatttgtttttttaggagagctttcactgcttcgttttcagtatagttttctgttttgagggcaatctttcctttttcaaagttcagtcctcctatcagagtgatgtcttccgctttcacttcagtaggtaatcccatggttatctgatcgcggtaggttgaaggaatagctgtcatggaagcaaagaagttaatatcatttttctgtttctccattttctggaaagctcctgatttcacgatactattgcttgctgtctgtttcaacaaattagtaatggcttctttggctttatcagtttgagttgttccgctgacattgactaccaatatagtagaactattgaaaacaagcaaaccgctattcatcgttgtaaaactgtaaccgtcagcttcgcctaccggttggcagatctgttcttttgccatcacgtcgagtgaagcatgcaacttatcttcattgttcactttacctacaacagtaggataagggaaagaagatgaagagaacacatagaatggagattcaacatcgattcccgattcgcccggattcttcataaccttttccagttgttggaatgtggccgcattcattccgcttttcagtgcttccagtactttttgtttagcagcttcattctctttatcatccaatcccgctttgcttgcgagggatttaaggttgatagaggcaactaccgaagcgtcagccggtatcacatttgtatattccgatgttttggaacatgctgccagaaaaacaatcagtactgccagtaccgagagtcgtgaaatcgttttctttgccatacttatgttatttaaaagttgtataatcattgattcagacatttactgctgttattgattttgcagattcagcgtgtggcaggccaccaatgccgctgtttctgtacggagccgtgatttgccgagactaatcggtacgaatccccgttcgatggccttcttcacttcttcttcactgaaatctccctcgggacctatcagaacaagggcgtcttctcctggtttcagaacattcttcaatagaggtttctccccttcataacagtgggcgataaacttctgtcctttaaactcctgcctgatgaactgatcgaactcaatcatttcgttcaattttggcagtcgtgccttgagagattgtttgatggctgataccagaatcttttcaatccgttcggtcttgatgactttacgttccgagaaacggcagttgaggaaagtcagttcgtcaaaacctatttcggtagctttctctgcaaaccattcgttacggtccatattcttcgtcggtgccatggcaatgtgtaaatggcacggccataacggttcctgaaaaatggtttctttgatgtttacgaaacaacgtttgttggttgcaacagtaatttcagctttgtagaagttacccttaccatcggtaagcgtgatttcgtctccgatacttagccgcagaacacggatacagtgttgtgcttcctcttcgggaagctcgttgcttttctgtatatctggagtataaaatacgtgcataatattacttactgatttttatttcttgaattgatttgatcgcgtatctgcgcggctaactcgtaattctcatctttaatagcctgttccagtgcttcttcaagcgttctggaagtagcaccgggcaaatcatgttcttcttcagccacttcgtcgttgtccgtttcttcagaacgggttctttcttctgacgacatgtgaagacattcctgttcaagaatagattcataaataagaatcgggcagtcggcacgcactgccagggcaactgcgtctgaagtccgtgcgtcgatacgtataatctcttcgtcttttttgaggtaaatataggagtagaaaataccatcctttgctttgtaaattaatacacgtatcaggctggctcccagtatagtaagacttgttataaataaatcatgtgtcaacggacggggagttttcactcctttcagatataaagcggtagcctgggcttccgctggaccgatgatgataggcagttgcctttcaccgtccacttcgcccaatagcatagcaaacgcgcctacttgcgcctggctgttcgtgatatttataacttgtaattctacctttttgtccatcgttctcttttacttaatttgttttactctcctgctggtgtttgtacttgaataccaaggcaaacagaatgccgattaccagcgcataagcggcaaagatcagccaaatgttcatccattcgcgactcaccagtctgccgtcggcatatacagagaatgcatcaactaccgcaccgctggcatatccgcccatgatggctcccaatccgttagtcatcataaagaacaagccctgtgcactggcacggatagaagatttggcttcttgttcaacaaacaacgaaccggaaatgttgaagaaatcaaaggccataccataaacaatcatggaaaggatcagcatccatagtcctgatcccggatctccaaaaccgaacaggccgaaccggaacacccaagcgaacatactgattagcatgacttgtttgattccgaaatgacgcaggaagaaaggtatggcaagaataaacaatgtttcggacatctgtgaaatggataacaggatgactgaatgtttcactccgaaagaatctgcatattcagggatgctggcaaaactgcctaggaaaaggtcgccgtaagtattcgtaatctgcaatgctgcacctagaagcatggagaaaaggaagaaaatagccattttctttttcttgaataacaccagcgcatccagtccgaaagcggagagccatgatttgttttcagatttagccggtcgacaggccgggagcgtaaatgaataaagtccgagtagcaatgcggaagcacctcctacataaagttgtgcacttgaattcttgaatccggtaaggtcgacagcccacatggcacaaataaaaccgattgttccccatacgcggataggagggaagtctttaatcaggtcacatttgtattgctccagtgcattgtacgataccgtgttggcgagggataaagtgggcatatataccaacaggttgagtaacatggcccaatacatctggtcgtatcccgttgcggtggaagcgtagaagagacatcctgctcctgcaatatggcaaagtccgtataaacgttctgcattaaaccatttatcggcaataataccgataatacccggcattaccaaagaggcaatccccatggtggcgaaaatggctccgatttgtcctccttcaaaatgaagttctcttcccatataaccacctaatgatattaaccatgacccccatacaaagaattgcaggaagttcataataatcaaacgaacttttatactcatgacttttttaatttgtgtttctcttcacattcataaaccttgcaaatataatattttcgttgaataggtggataagtaatttgataaaaaggggataaaaatggcataaatgcgaagaaaagatgagatttgggtgtgaaaaaacaaatgaagggggtataaaaaaaagaaggctatctatcccagacagccaatctttgttaaccttaaatctaataccatgaaaaacacagtgcaaagatatagggtttatgttatacaacataatgttttctcgaaaatattctatttgttaactctaattaactttgaatcttccgtttttctgttactgccctctctaatcagccatacttccggagaaatgtctgatatccgaatggaaacttggttccggcaccttgccggttattctacgtagagtaccaatcctttcagatattctccttcgggatgatagatgtttaccggatggtcggccggttgagtcagctggtgtagaatgcgtacgctacgccctgacatggctgctgcggtaaatacggcagtacggaaattgtctttgcttaccacttgcgaacaagagaaagtaaacaggataccgcctggtttgattttctcgaatgctttggcgttcagtttacggtaaccttgcaaagcattccgcagtgcatctttatgtttggcgaatgcgggcggatcaaggatgattaaatcatactggtcgcccatgcggtcgagatatttgaaagcgtcctcggcaaacgcctcgtggcgggaatcaccggggaagtttaattccacgtttttgttagtcagatcaatcgctttggctgaactgtcgacagagtgcacgagtttcgcacctccgcgcatggcgtagaatgagaatccgccggtgtagcagaacatattcagtaccgaacggtctttggcgtaacgttccagcaaagaacggttttcacgctgatctacaaagaatccggtcttctgacctttcagccagtccacatggaacttcaagccatattcttgtgcgatattatcactgcttcctcctttcagaaaaccgttttcggggaaaaggtctgccttaaaaggaagagttgtttctgatttataatagatattttcgatcttgtcacccattacttcggataaagcttcggcaattgtcatgcggtctacatgcattcccgcagagtgtgcctgcataacagcggttttggcataaacgtcaatcaccagtccggggagattgtctccttcaccgtgaacgagacggtaagtgttgttggtcggattagtggcgatgccgatactgcggcgcatatcgtatgcaatttccagtttgcgtttccaaaaatcgtgatcgataggttcctggcggaaagacagtacgcgcacagcaatacttccgatctggaaatgtccttcggcaataaattctttttttgaggtgtacacttctacaacttcaccttcatcgggctctccgtcaaaacgagcgatagcaccggaaaaaatccaggggtggaatctcttaagagaatcttctttaccaggtttgagatatactttatgcataatgtagtctttcctcaaccctctcccaagggggagggcttcagatcgttttattattggttattaatcacttattttattacttatcacttcttccgcgggagagacagtagctgtcagcggagaaacctcccaatctcccgtctgtttcagttcttgcaacagattgtagatattgaggcatgcccatgcatcggtagcagcgtattgtttctgtccgtcacttaatacatcagcttcccagttggacaagcgttgtgatttggatattttttctttgaataagatggcgtaaatcttttgcagacttttgtcctgtattccgaattgacgcacatagtcctgtaattcgatacagctttgttgggtgaaaggtgcacgtttgtgcagcatcataaagtcgtctttcagtgaaagtcccactttgattacagccggattttctaacaagtcaaccaatggctgagtcaatcccgtcatattgagccggaataagaaacagcattcttcggaagaaatctggagaagtgctactttgtgcgattgtcctttggtaaaggaagggcgagtttcgctgtcgatacctatcactggtctggattggaggtaagctacagctttttccgtttcagcttccgactggataacataaatacgtcccggaaagactgttttcgggagttcttttagttcatctttatctatggttcttcttacaatcatttttattttaattcatcatcgtggcaatggcaaccgtcttcgtgacagtggcaatcatcatcgtggcaatgacagccatcttcttcacaacaatcgttgtcgtcgcttggttcgtaaaatccttcttcattacctacttcctcttcttcttcctcctggttgtatttcacgtcatgaagggcgcgaagtgtgtttaccagtttctgtccccacagtgtaccgaagttttcctggcagatggccaatgaatcattcattgtttcgttcagtcccagttggaagacaaatatgaaatctttaatatcctgataaatgtcggccaggtcttccgatatagacttcttgataggttggtcgctatacaccatatcttgcacgaatacgtccagataatcatccttgtcagccatcaatccggaaaggttgatacgcagaatttcgtaaatctcttctgtgacatacgtttcaagtgcttcgtccccgatagtctcacatttgggcagcatagatgctttgagatagagtaggggaagtatttttaatgatgtatcaacgaaagtgctacgcttcatgcgttcggcacgttcgagaaatgcacaaaattcggcagctaccgttacgaactcaattacgtttttatcaaatatcgtttggctttctttttccatgatctatattgatttgaaacgcaaaggtaagaaaaaggattgaatgagcgtagtgctcgttatttttttattatttttgcagcttagaatctcattccagttttataaaaaagaattaaagactcatggcaaagaagaaattagataaggaggcggaacgtactccctcttcccccagtaaaattttggctgtatttaagaatgaaaccattcattttgtaatcggattgatgctggtcatcttttccgtttacctgttgttggctttttcttccttcttcttcacgggggctgccgatcaaagtattattgatagtggcagttcggcagatttggcagctgttaataatcaagtgaagaattatgcaggttcacgcggagcgcagttggccagttatctgattaatgactgtttcggcgtttcctctttcttcatacttgttttcctggcagtggcaggattgaagttaatgcgtgtacgtgttgtacgtctgtggaagtggtttatcggctgcacactcttgctggtctggttctccgtattcttcggatttgcctttatggatcattatcaggattccttcatttatttgggaggtatgcacggatataatgtcagtcgttggctgatttcgcaagttggagtacccggtgtgtggatgatcctgttgataacggctatctgtttcttcatatatataagtgcacgtaccgtcatctggttgcgtaaactcttcgcattgagtttcctgaaacgcgaaaagaaagaagaaaaggagaatgttccggaaggagaaggagatccggaatttacgacctcccaaccgcaagaagtggagttcaatttgaaacggacgtataaacagacacctcctccggcaccagtgatggatattcaggctgaagaacctgaagacgactttcctattaataaaccggaaaaggaagatacttccgtatctgacgaaagtgaaggagtgactatggtatttgaaccgactgtttccaatcctgttcctattgtgcaggaagactctttggaagaggcggaacccggatttgaggtggaaccggcagcttcggaagaagaataccaaggacctgaactcgaaccgtataatcctactaaggacttggaaaactaccgtttcccgactatcgatttgatgaagcattttgaaaatgatgatccgacgattgacatggacgagcagaatgcaaataaagaccgcatcatcaatacattgcgcagcttcggaatcgaaatcagtacgattaaagcaactgtgggacctacggtaactctatatgaaattactccggaacagggagtacgtatttctaaaatccgtggtttggaagatgatatcgcattgagcctttccgctgatggtatccgtattattgctccgataccgggtaaaggaaccatcggtattgaagtaccgaacaagaatccgaagattgtttccggacagagtgtgatcggaagcaagaaattccaggaatccaaatatgacttgcctattgtattgggtaagacgatcacgaacgaagtctttatgttcgacctttgcaagatgccgcacgtattggtggcaggtgcaaccggtcagggtaaatcagtcggtttgaatgccattatcacttccttattatataagaagcatccggcagaattgaagtttgtactggtcgacccgaagaaagtagaattcagcatctattcggtgattgaaaatcacttccttgccaaacttcctgatggaggcgaaccgattattacggacgtaacgaaagtagtgcaaaccctgaactcggtttgtgtggagatggatacccgttatgaccttttgaagatggcacatgtgcgtaatatcaaagaatataacgagaaatttatcaaccgccgcctgaatccggaaaagggacataagtttatgccgtatatcgtagtggtgattgacgagttcggagatttgattatgaccgccggtaaggaagtggaacttccgattgcccgtattgcacagttggcgcgtgctgtcggcatccacatgattatcgctacacagcgtccgactactaatattattacaggtacgatcaaagccaacttcccggcacgtatcgcattccgtgtatctgccatgatggactcccgtactattctcgaccgtccgggtgctaaccgtttgattggtaagggggatatgctcttcttgcagggagccgatccggtgcgtgtgcagtgtgcctttatcgatacgccggaagtggaggaaattacgaagtttattgcccgtcagcaaagttatcctactccgttcttcctgccagagttcgtgagcgaagatggtggtagtgaagtaggagatattgatatgggacggcttgatccgttgttcgaagatgcagcccgactggtagtgatccatcagcaaggttccacttcgttaattcagcgtaaattcgctatcggttacaaccgtgccggacgtattatggaccaactcgaaaaagcgggaatcgtaggccctacccagggaagcaaggcacgcgatgtcttgtgcatggatgataatgatcttgaaatgcgattgaacaatttacagtaaccgttcgtttattaatcaaatgagaaaatacatttttagtgttttaatagctttactgtctttgcctgtgattgcccaacaacagcagtcgcaggctaaagtcattcttgataagacggcagaggcgtttcgtaaagcaggtggtgtaaaggccgattttactgtaaaggctgtgacgaacggtctggtagaaggtgttgaaaatggaacgattcagttgaaaggagagaaattcgtactgaaaacgtcggatatcatcacttggtttgatggaaaaacgcagtggagttatatgacaaagaatgatgaagtgaacgtcagcaatccgacacaggaagagttgcagcagattaatccgtatacatttctatatatgtatcagaaaggattctcttataagttgggagcaactaagatgtatcgtggaaaagctgtttgggaagtcgttttgactgccagagataagaaacaggagttggaacgtatcactctttttgtgacgaaggatacttatgaacctttgtatattttgcttcaacagcgtggtcaacagacacgtaatgagataaccattacaagttatcagacaaagcagaattatgcggatcaggtttttacgtttgataaaaagcaatatcccaatgcggaagtgatagatttgagataatatacgtttataacaaaacgaaaaagataaattaaaatggcagaaatagaaaaagtaaaatgcctgattataggttcaggacctgccggatatacggcagcgatttatgcaggacgtgcaaatttatgtccggtactttatgaaggattgcaaccgggtggccagttgactactactacggatgtggagaacttccccggttatccggaaggaatcagtggtccgcagttgatggaagacttgcgtgcacaagcaagccgtttcggaacagacattcgtttcggtattgctacggcggccgatttgagcaaagctccttataaaataacaatcgacggtgataaggttattgaaacagaatcattgattattgctaccggagctactgctaaatatctgggactggaggatgagaagaaatatgccggaatgggggtaagtgcttgcgctacttgtgacggatttttctatcgtaagaaagttgtagctgtagtcggtggcggtgatacagcgtgtgaagaagctgtttatcttgccggacttgcatccaaagtatatctgattgtccgcaaacctttcctgcgcgcatcgaagattatgcaggaacgagtaatgaaccacgagaaaatagaagttctttttgaacacaacgcagttggtttgtttggcgacaatggggtagaaggtgtaaatctggtgaaacgttggggcgaaccggatgaagaacgttacagcttgcctatcgacggtttcttcctggctatcggacatcaaccgaatactgaaatatttaaagaatatgttgatacggacgaagtgggttatatcatcacggaaggtgatagtcctcgtacaaaagttcccggagtttttgcggcaggagatgttgccgatccgcattatcgtcaggctattacggctgcgggaagtggttgcaaagctgctttggaagcagaacgttatctttctgccaaaggactcatttaatccggtttatatccgaccataggagggtattaaaacccttatgaatatgaaaatcacccacgctagagtttaatctgtagcgtgggtgattttgttgagaggggagtcttgctcccctttattttataaactcaaagcttttcgaacaatatttgtcgattgtctttggttaatacgcttctatttcatctatccataattcggcaggaatgatttccggcccgttattcttttcaaagttgacaccattacgcagtgtgccgccattcttgattttgactttcaggaatgtagcctgtgccggttcaaattcaatggaatcggtgaatgcaattcttcctgtttccggataatcgtgtttcaaagctttttcggctatccgtgtgtattgcttgccgtctgctgatacttctacagcaactccttctgcaggaagaattctcatggcaggattgaataaagaaccgaaaataactttgctgacttgtgtcggtttatccagatgaacgataaattccaagtccttaccctccacgatgccaaaactacaccacggagtataagaagcattattgcctcgtttgccgttggtcagtccaaaggtggttttgtcagctcctaatacatcgttttcatcgaatatatcgcctgtccatcccatcgtataattaaccgtataggactttcctgtcaataaattgccatacagtggcttgtgagctactttgcccaacatctttccgtctttgaaagcagcggctttcaggtcgatattaccttcaagaacgaaaggcttttcatataagatggacactttggacggttcgctgccgtccgttgtataccggatttccgcattcgggtagaaactttccagcaataccattaaagggccgttttcatctgcgtgcgtatttatatttacgtcatagaagttgagacaaggttgggtgttcataactttcaaacgttcaaattcagtcaccatccgttcgcagaaattcttccagtctttgtttgcgttttgtgtccaggccgtttcggcgatagccattgcacgtgggaaagcttggtagtctgtacgttctgaagtctgcatatattctctccaaatattaccttgtattccgatgatatgcttcttggcaagctcgtcagcgtcgtccggaacagggttatagctatatgttttcttcaaggtattgtatccgccaatagtagtcggagcaatttccggctcttcctgatagtagtccagatatacataaggactcggagtcatgatggcattatgccctgctttggctgcgttcataccgccttctacaccgcgccatgacataacagtcgcattgggagccagaccaccttcgagaatttcatcccagccaatgatgtttttgcctttgctattcaggtatttctccatacgggtaacgaaatagctctgcaacttatcttctttgctgtgctttattccgtctatcttactgggagttgtatcatctttcaaccctaactggcggattaactgctggcagaaagcactgttcttccacgctgtcttgggacattcatcgccaccgatgtgaatgtattcgctggggaataattctataacttcatccatcactccttcaaagaatttgaaagtcgtttcactcggacagaatacctgttcgaatactccccaggtaggagatactttgtaagtctgtgtagagtcgcatgacaattccggataggcggcaagtgcagccaatgcatgtcccggcatttctatttcgggaacaacattgatgtatttacttgcagcataagccactacatctttgatttgctcctgcgtataataacctccatgttcttttccgtcgaatacttgcggatagtttacatagtaatagtctactaatgtcttttcacgtttggaaccgattcccgtcaatttgggatatttcttgatctcgattctccatccctgatcgtctgtcaaatgccagtggaagacattcatcttgttcatagccagtaagtcgataaacttgtaaatgtagtcaatcggtacataatggcggcaaacatccaacatgagtccgcgatgaacaaaacggggtgaatcttcaatttctacggcaggaaccgaccagtcagctttcttatccaactgctttccgtaaattgccggagggagtaactgataaagagtctgcactccataaaagaatccgtttggctgggaagcggtgagtgtaatgagactgggagtgaccgataatttataaccttctttcggcataccttcctgtacaacaaaagagatcgccgtttttccatctgcactttcagcttctttcaaggagattcctgctgtcagttttagttgttcggccaggctgtcggcaatgctttttacttccggagcatccgagggaactacgaggcagactttgttgtttagttcaaagcgtccttcctgtggaagaatctggttgggtttgggaacgatgttgtactcgttcgccgcttcttttgtcttctggcaactgggggtaatcattagcaaggacaaaagaagaagagaaatacttttcttcatggtcaaaatgtgtgttaagttataaatagatttgacagggcaaatgtacttgtttatatgataagttccaataatatggaaataaaaaaagccggaatgatgtccggcttttagctaaagtttcagattaatgtagttatataattaagagagagtttttatttcagtagttgctcttcgatgatttgtacgtacttctccggagtagctccgacttcaataatcggtttgccgcctgcaggtatgaagaataaggtaggcaatgcctgtacaccgaagtgattgcataaatccttttctttgtccgcattaaccttgtagaatacaactttacctttatacttttcagccagcttttccatttccggaagtaagcgcatgcaaggtccacaccaagttgcccagaaatcaattataaccggtttctcgccattataaacgaaatcgttcccttttctgtagtcgaagatgtgttcgaggaagaattggcgggtaatcggattcagtttaccgtcttcaactttagtttccgttactttagcttccgcttccggtataggaaccatgtcaaacggctggaaataaattttctgatgaatatagtcaatggatatgattccgtagtccagtatctttttgcctaatacggagcgtttcaggtatggattcttcactgccatggcatcctcaatctttgtttttacaaacatggtttcaggtaagatgaggctttcctcttcttgagtcgcttctttatatccattggaaactttttggttggttcctttggtatattgtgtgctccatgtattgaaatctttttcggtaagattcactaatccttcgctccatgtatccagaacaagagaaacgggttttccctgaatggatattggacatacgattcctaatcctgtaattagctcaaagttctcccggtagtttaatttcatgtaagaaggacgatagggctgcgtaattgtgagttttttccgctgcatatcaatagtcagaacggaagtgcggaaaatagcaccgcttaatacacccatcactcccagcttgcgcagatatggttcgtcttccagagtgaaagcaggcagatcgttgttaaacgtgttgttgccaatagcaactgttgccatttcatatacttttccaacaggtacttgtttgaatacaaaatcctgataagcactaaaagtaccgttcttccccgtgtcgatgcgtaacttcttgagagcctcaggaagcagggcgttatgtcctgacagatcgaggacgaagtctgccacttcgccattaatggcggcttctacgataatctttccatcaatggttttgaatggaatgacctctgtcatactgttctgtgtctgtgcactgattcctccggcaatacaaaatgcaagtagacagagatacatctttgttattattcgcttcatatcttttttctgtttaaagtttatttctctttcctgatttcaatctttttctcttgattgtctttcttgacaataatataaccggtatcaccgcggatggcgttcatgatatcttccacagccatttggctcatgggacaatcgtccaaagaagtaccgttgatgttaatcacctggtcgccgaaagcaactttatctttcatgctgtcccagatcgttgtaatttcgaatctgtcattgcgtggcagaatactcacgttccagagagcgggagcaccgcccatgtcggtttttccttcttcaaacgggaaaaagtagaatcgtctgcgcatataatcgataattactttaccgtattccagtaaatccaccccgatgatgcttccattcatcactgtggtcgtactacccacgttcgtgaattctttccccatgatgttgataggaggaacagtcaccttctttatatccaccggcttgcctagacctgttattccggcagctacgataccatatccatggttagtaactttcgaaatgtcagacagcctttcataatcttctgtagaataaagcagaaagcctcccgcacctgtatcgaacagaaccttgaagtcattgtcccctaagcggacattgacaatggagtgatgatccgtctcatccaacagcggaatcccatccgttacttttagtccttcgggacgatacggataattgataaccattattttagaacgggaatcgaatgtgactaccgactgtgcgaaagcgtctcctccaagaataccgacaacccctagtccggtgaagaatggattcttaggcagtaccatcgtcttcaactgcttgattttatagttttccccgatagaaacattctgtacgtgcgcttcctgataattggagccttgtgcattcacatcggagatacgcatatatcctgcggcagtagctttcatttccgttgcggcatcatacatcgttccggttcttcctcccgtatcgacgatatatttcacttttataccgttaacagtgacggggataatgattttctcttgtataaactcataaggaatggtgtcgcaaaccttattccggatttgcgctgccattctttgtccgcagtttagaaataatagcagccataagccggtcagtattcctatacttttcatattattctttttcatagataatatcctttactccggaagctgtctcaatcgtcagtttcgtcttctttttctctttcaattccggtattccgttcagaatactttcgcagaagtcatatttcttagcaggtttgccattgattttaactaccttgtctccgactgctatcttacctttcgtactgctccatacggtagatacaaacaaatctccgtctttgaccgttaagtcaaaattgttaccttgattgtttatttcattgtccggttgaaatgcttcgaaatagaatcttccgcgtggatagtcgatggtcactttaccgtattgcaacagtttgacacccaataatgtgtaagggtgattgttggtgctggttgttacgttacggaatttggtggctccgactgatagcaatggaatacgaaccctgtaagaagaagctttgtccgcctgaccggatactccgatactcccttctccatacccttcggaaaccacttccatagaggcttccggtttgattttttcaaaatcactttcgataagtgataacaggctgggactaccagtatcaaataatacatttatattgctgaccggagctatctgtacgctgacgatcggcataccgccccctttggtgaaattcaacatctttcgtaaagacactgtcgatggcttttcagcagaggtaactataatatttttggcttgtgaatcaatagtgacaatggtgttggcgaataaatcactgccgatgatgccatctactccaaaacattcccagccttttacttcatcaatgaccagtgacggagcatttttgaaattaataacatggtcgggggtagtcaggttctctatccgggtagtcttgtaatagctttccacgttattcacatccgttactttagtcgagtcggtggctgccatttgcagtgcctggcaggcttgagtcgtgagtgccgtacgtcctcccgtatcaaatatgaaaggacgtgccgtgccgttcactttcatttcgataatcatcttttcacctaccatccggtaaggtatggttgccttatattgttgggcgaatacaggaaccgccatgcaaaaggcgacgacggttcctatcatacgagtcgtatacttcataagctaattttatttgctgactttttctgcttccaaaattgcctgataagcgtttacaatacctccggaaatacacaaatcatcgaaaaggaacaagtcttgtgaaggactgtcgtttacgcggattcctttttccacttccacccctttgcgtgaagtgacactcttcagtagtatgtcacggatttgcgagccggttaatttaggaaaatatgatttcactaaggcagctacaccggctacagtagccgaagccattccttctccagttcctttttgataagtgtcacccatataagatgaataaatgtctgttcccggagcataaatatcgagagcagttgcaccgtaattggtgttcaataccggatttccattcttgtctgaagaagcaaccaccataaaattggtaagttctccgtcttttctcatcttccggttagggaaaaactcgtctttatccatgtctgctgacagatcccagaccggaactattaccaatgctcctttcttttcagcttctttcagtgcatctgctacccattgtctctgttcttccgggtataatgaattttgttccggcaataaaataacatccgctccatggtttactgcatactggatagccagtgccatatcttttaaataaggttctccttctcccgggtggatgcgtaaagtcatgatttctgcattgtctgcaataccgttacttccgataccgttgtcacgtttagctgcgataacgccggccttcattacgcctgttgccgcatcagatgtcaacagtacattattgccgtaatgcgtgtcgttaatatccagaggattatcacctacaatttctttccggttatcagttccgtatttctttaaagcatcttcataggaagttttagctgtttccacactttttttccccattctttggtatacgagatcccatttgtccgtttggtaaatgctgaatgaataagcggtaaaaacaaaagcaatttcagaaaggctgtctctttctgccttaggatcatagcagctctggaaatcatcgacagttagctcttttccggggaaacgctttttcatgtccttatcaaacttctcaatatattcttcaatgacataagagagttgcagtccaccgtatgaaccaccgattctggattcaggcattactttataacgatagtaattgtattcttccaaattttccggtgcgggtacttcctgacgttttccgttaatgattttataatatttctttccgtcaaagatataatctgcatatttatctttcagacggaaaaattcacgttctccttcgcgtgtcagagattccatgacctgaccgtctttgccaccgatgaaattccaaccattgatgtcgtctatccaaccattcttgtcatcgtctttctggtttagtttttctttgggattcacccagatagcctgtttcagatcttcgtgttctacgtccattcctgttccgatcaatgcaacaaccggtcttttctttgctttctttttgttggcattcaagtaatcataagctttgtttacttcagctccgtatacactgtcctggtcgaaagaacagttaaaccagtccagttcggattgttttttttgtgtttctgcctgctgtttgactaactgggctgatactgtcatgctgataaaacagcatacgattggaaatataagtttcttcattgtcgaaagagttataatttatatagtttgtttattgtcttatttttaaaatggcttctcgtacttgttcccctcggacattacgtgcagcgagtttaccttctttgtcaatgacaacaaggaaagggatggagtagaaaccgtaagcagtctgaatagcacttggagtcttgctgtttttgggaaatcctgttttatcccatagcatcacccacggcagtttttcttcatccagcatttttctccattttgcttcgctgtcatccaacgaaacactgatgaattctaaatcatctgctttcagatcattgtatattgtcagcatactgcgcatctctttgcggcaagggccacaccaggaagcacagaaatccagtacgacaatttttccacggaagtcctttaaacctatgctctttccattgttgtcaatgaacgtaaaaccaggacattctgcaccgataatctggtgggagaggacttctactttgttgattaaccatttggcagacaacgaattcctatcttgttccggtatcatatccaataacattttgttggatgggtaatcattcacatctgccagataagctaatgcggatgccatggcagatgtcagcttctctttggcagaagtcgggattgttgctttatccggatctctttcggtcggcatatagttttgtaaagtcagaaacggatcaatgccggtgaatgaaagtgaactttgttcgggattcttttcatcgaaaaaaccatgaatggttacaggtctgttttcgaggtatatgttttgctccgtattcccaatatatagtgtatatacatcggatataatgtcttttttttcggtttcgaatactccattttggttaataggacaacttaaaatgaggttcccattcaaatccttaacttgcaaagtggttggtttgagtagtctcaactttcctttgaattgaagtccgctgtcgctccatagaggagtggtgctgcataagagcaataatatcaatgagagtcttattaatttcatgatttggagtttataatatatggtaaattctaaatatctttattcttattttatctatcctttaatgaaatgactaacttaatcgttatggaagagtttctttaccaatctccccagtctccccaaggatcatcatcatcgccatctccttcatcagttttcggtagttccggataaggtttaatatcccaatcttccggtcctttggcgatagcttccaaatcaatattatatttttttagatagtttgtcacaaaatcgaacttagtgcttagaaatggataggttgccgaaggaaacattacttcccgttcttctttggtatgacgcatggctatttgcagatagccgataaatgtttctttggctgttggaggattatcggaatcgggtttagaatgtttacctgataatgaatttacattaccaggatagcctcttttaagataataattaggatcggctttactttcgatgtcttcacttctgacaatcggagttaaatggtcaaatcctgcatcaaattcatcttcgggtatgataatatttccgttggcgatagctgtatttataacttcatcaattattttgaagcggcgtatggtaaaactatccttattgccggcaataggagttttccatcctgtgattgggtcatcgtaagtactgtgggctttatctccccagaaacaagttatccagcagtcggtttggccgtcatcatgctcgggcagtgcaacataatattccagtactcccggtataatggaagtaaatacagaataattgtataccatataccagtacatgggaaatactctatccgtaacttcccggttgaggtaaggaaaaatgtggttcttcataaaagtaatataaaatgctcccatttcgtcattgagacaattctcgaagactcttgatgaactaccgactccaccattagtccaatttttattgagatctttttctgtgatatctttatatattattttcactccgaagtcttggtagattttcataacatcattgtcccatgaattatttccctgcggaaactcaaatcctccggcaagtgcaagtggatctggtgtcgggttgataatatcttcattataacaggacgagaatgtgagacagaatagtaatatccatacattatatattggcttcatgattctctgttgtttaaaattgacgatcattatttcttatatttatagttattttgtaacaggaactccagtccgttccggtccgaacggattttgttccaataataagtttctttgcaacacttctgtaggaataggtaatacgtatgaaggatcgttttttgttagtgtataaactttgccttcccatttgtgctgtatggaaggcataccatatcgacgtaagtcgaaccagcgttgtccttcgtagcaaagttcttttctgcgttcttcacgtatttgggtgatcaaagcatctccgctcaatccggaaaaagacggtgcgtttcctctatcatatcgtttctccagcaatgtattcatagcggtgatggcatctccttcggcttggctcatggcagcggcttctgcatagtttagataagcttctgctattcggaaggagagtgcaaaataatcactgcttccggaagtggggacagaacgtagtgtcttatatttgccataggggagataagtatcataaaatgtgctgttctccggaaccgcctcgttatattgcatttccctagtaatataacggtctttgcgtaagtcaccttctgagaaactgttgattaacccgtctgctgctttgaacattcttctggtcttttcttcatcgctgttttcatctttcttatcgatataaccttcgtattcacctgtcaagtctctgatagttccataactccagatgacttccggcgaatcatatgtattgaatgtgtaataaggttcttttatacctgcttccggtgcaggaatagtattcagatcgcgtagtgagaagttccaatctttgataactttctccgcatacgttttagcttcttcccaattttccatatatagagctacacgtgattttaataattgtaccataggtaaactgacaaggtagttcggttcatattgttgtgtggcggagagagttaggaataaacgttctgcttcgtttaggtcggtaacaatctgtcggtatacttcttctaccgtgttccgtctcatcaatatattgtcatcatctctcattttactgtccagcttgagaggaactcccaatgattctttgttataattatagggaagtccgtactgattgactaacatataataataaaaagcccgtagggcataggattgtgccttaatataattcttttcaatttctgtaccggatacttcgtcaatatagtcaagtgtggcattagctcctaaaatatattcataaaggttctcccaagtattgactgtttgttgtcccaatttttctcgtatttcgaacatattgggttgccagctatacagtatctcaaatatttccatatctgctttgtcgttttctgggaattcgtaaccttccacctgattctgctcgacatcatctgcgagtatttcctgatagttgagaaatttggtatccttttgttggggataggcttctccgataagcatctcttgcaatgcattagcgtctttaggtatatattggctctgtgactttggctctaagaaatctccgcaagcggtgaggccggtcagtgtaattgtataaattaaatatttaagtttcatatctctctttgtttattgtttaaaatcctatattaagtcccaatgagaaagaacgtggcatgatgctgttttctaattccggatcaaaaccattaaaacgtttgctggctattacaaatacattgtccatattaaagttaatagacaggtttttagcatgtatcttgtcgcaccattcttttttcatctgccaggataatccaatgttacggcaacgcaggaatgaagcgctgactaccatagcatctgatttttcccacatataaatgggtgattctgcggtctccgtgttaggcaaagtccaagcgatccctaatggccatatcggcaacccggggatatttgtgtaagcttcgtctcctgttttttgccagcgattcaataaatcgcggtttatattcttggttggatcgggcatcatattatgttctcctcggaaatcattgtaaggtgacgtcaaacgctttttgctacctaacaaaagggaaaagctggtatttagtgacaaagatttgtagcggaaactcaaaccgagacctccggtgaaatacggctctttttctccggaatatacaaggtaagtggtcgggtcgatgcctttacttttttcttcttccgggacttcaacatagttgaacatcggtttgccgttacttccatcaagaccggcaaaggaatatgaccagaatccgcttaacggatatccttcttttaatatctgggtgttgcttccggtcaagtacatccccgtggttctgtcaatcgtggtttctccgcctttgttccagtttttagaggcattcaggttaatattcaggctgaaatcacgtttctgaacaggtgtgaatgataacgtgtattcaattccccgattgtaaataattccgccgttacgtttcatgtcgttaattccatattcgaatggtaaatctacggtgattaccgcattggaacgtcgggtgtagtattccagattcatataaaacatatgaaacagttccaggtccacaccgaaattccagtttttggtacgttcccaggagagatacggattggggatctggctaatagtggagtaatatcgattatatcctgcttgtactccgttctgacttaagattagttcaggactttcacgtgtcaaagcgtttccctgaataccaaatgttcctctgaaattgagtgttgtgatccatttcagatgcttttggaagaaagcttcttccgatgctctccaggaaaaaccgaatgaataagtcgggtcgatacggtgattgatatcctgtccgaaaacgttggaagcatcatttcgtacattggcattgactacatagcgattcttgaatgagtatgcaaaagtagcgaagaacgaaaggaagttgttggtattgtttgttcttttccaacctctgtcataaagttcttttaatattccccagcctgttggacttccgcccggtgatactacttggcttggtatggtaggcgctacaatacgttcacctctgtccggtacatatccccaaactgtattggctgttcctttagctgtagacgagcgaagttccatacccaatagcgcattcaatcggttattaggattgaatgctttgctgaattgtagcttgttctggatattgtaagaatactggttattgtcgtttgtgtacaatctacctccgaatggaagctgtgcagctttaaaatcggcactggtgggagtaacagaattaaaatcgtaaccacgatacaggttggcaatgtggtacgtgtgttcggtagcccagctttcatttgtactgttattagtcgaataaccgcctgtaaattgataagttaaccagtcaaggacatgccagttgacatctaaggaagcggacatgaagttggagcgtgcttttgaaccgctgttgtcccgttcattgataaaattgtatgaaagggtttctttatttcctgttttataatagtatccgttttcttgcatataataagcatccgggtcgatgatacggtttgtattggtagcataacccattggattgatatcgtcgaaaaagccgttagtagtagaaacgctaccgtttaaagtcatactgatagtcagtttttctatcggacgtaacatcagagcgatgcgacctgtcatacgttcgttatcattgcctatttcctgaccttcgctgttgttatatcccatagatgccgaataactaaacttgttcgttccaccggaaacactaacgttgtgactatggctgaacgaacggcgtgtcaggcgtttgaaccagtcagtattgcgggtttccatgtcgttgtaaagttttctatattcgatatcagaaatgtcatgttcctgcaacatccgtaatataccttcataggtgttaggatccttataaggcattgttgcgtaagtgattcctgcatcgaacgcctcttgtgagaaacggatgcgttcttgagagttcataaagttgaacattccataattagggcgttgcccgatgttaaagttggcggaatagttcacagtcaatctgtcagtggtattctttttggttgtgatttcgattacaccgttagatgcttttgaaccatagatagcagtggcggaagcatctttcaaaattgtgatgttttcgatgtcagcggggtttagccatgaaatctggttgccgatgatatcctttaaacttttagtcatcagttcgccgctatctagtgttacttggaaatcttcctgaataataccgtctactacccacaatggatcacgatttccttgtagcgtactggtacctcgaatctggatcttaggcgccgtacctacacgactacttgagttagtaaccaccatacctgctacacgtccttgtaacatttggtcgatagtagtgtaggaaggtattataatgtctttcgcttttatcgtagtaatggaaccaacaaggtcgcggcgttgaatattctgataaccggtaaccaccacttcgtcaatttccgtactggaactggtcagagtgacattgattgttttcttacctgtatatttcaacgttttcttttccattccgataaaagaaaaagttagaatcaatccctcttgtgccggaatattaaaagtataatgtccgtccaatccggcgatggctccatgtttggagcctcgaatcgtaacagtggcaccgggtaatgcttcgccactggcatctcgaatccaaccactgattgtaactttctggctttgctttttctttataacaattgcgctaccagagatttcgtaagtcaggttagtgccttccagacattcatccagaatttcagtaattgtcttatcttttgccttgatggtgatatcggtcacattagcaatgtcttccgttccatacataaagacaaatttcgtacgattctgcagataccagagtgctgcttccagcgtttctcctctcaagtcgatggagattctctgattgtcctgtgcttgaatcatgagtgaagaaagggagaatatccataaaagacagaacttcacaaagtttctgcttgcataagataccacccacggcagggattttactcgttttttcataatgcgttagttatattatgtattattactgtttgtaggaaatgtgcaggatgccctcccgttgtttgatattgaccagatttaattctgtaatcatgtcgataatcgggttcatgttggcgtagcggttaaggtaagctccgatacgcacctgtttggctgcttcgtcttcaaaagaatattggaatccataccatttggacaggtatgacatcacattctcaagagggacatttaaaaagataaatgatccggattcccaagatgtatacaaatcagtgtttacgttggcgacggtatttgtaccggtatttttattatatgtatagtgctggttgggaactaattcgaattcttcatttctactgttgattcttactgttccactgattaaggtcgtactttccgtatcttcatcagcgtaggctcttacgttgaacgacgttcccgtcacccggatagatgtatgcgatgtttttacgataaacggatgctccttgtccggggcaacatcaaaataagcctccccttcaatttgcacaatacgttctttactactgaaacaaaccggataagtcagccgggtttccgcattgagatgtacccttgtgccgtcggaaagcgtgataaggcattccatcccctgcaatgtgcgtagtgtgttttggatttcttttacttgcggtttgttggcgggaatctgatagttaatccctttcgaatcgatcacaaatgctctgaccgcattctccggaaaattattgtcggaaagattgaaagatttgccgtcactcaagatcagttccccgccaagggttcccggagtgatgtcgctaatcgtttcttcggatatccaatgatagataaagtaagaagcaggtactaataacaataagatgagagctgcatatttcagactctttttccacgaaaaaacagtacccgattgattgcctcctaataacggatagactttctcccacgctttttgtgaagagaagctttttattaaccggctgttttcttcatacgtttccttatttaatatccggtcggctatcttttgatgttccgggttttcatccaaccatgcacgatagttcttttcctcttcgggggtagacgaatgagtaaataaggaagctaagatttttgcaattttaaatttttctttaaatgaattcatcgttttttcgatttgttatataagtaaaacaatccaatcgaaaaaacggggtaatcaaaaagttactttatttgcataaaaatagtaataaggtgtaatttatgcctttgagactttcgcgaagtttgcgataggcgaatttctttaacgtatggacagtgccttctgaaatttgcaatttgtcagcaatctcatggttttttaaccctttcatagaatataagatgatatttcgcatttgggtaggcaattcttctaccgctttgcgaaccatgtggaatgtttcctgttcgataatggcagcttcgaagccactatcgaactcttcctgtccagaaaaatagggaatatctaattgctcatgttttaagtgattcagacatttatttcgggtgacggtataaaggaagctttttactttcaaaatgtcgtcaaaatcttctttccgttcccaataagctaacaatacatcttgtgcgatgtctttgcaaacttctttgtcttcaatatagtgggatgcgaacacgcaaagaataggatagtagtcatcaaatagctttttgaaagcctgtttgttgccacgttttatgtctgcaattatattttctatatgtatgttcactatttagggtggaacgattggtgcagaaactctcttacccaatcttgcttattttcttcagcttttcttcttcgatgattttgatttttcttccgtcgatagtaatcagtctttccgtagcgaattgcgacaaggtacggatagcgttcgaagtagtcatattggaaagatttgccagatcttcacgtgaaagataaatgctcaacgtagaaccgtcttcttccagtccataactttctttcaggaagatgagtgattcggccaagcgtccgcgaatatgtttttgtgtcagattaacggtacgttcgtcagagatacccaagtcaatggaaagttggcggataaagaacatggccaagtcattattttgggcaaccagcgtagtgatggcactcataggaatcaggcaaacaacggaaggttcgaaagctgctgcggcagttacaaaatcttgtttggcaaaataagcacgatatgcaaagtattcgcgtggtttaatcatgcggataatttgacttctaccccccacaccatctttgaagattttcacttttccactgatgagacacatcagatgatgtggcgtttctccttcacagtagatggtttcattctttttgtaggtttgtatcgtataattattcatcagaaactccttttgctcattgtttagaggagctaacatatcggataatggttccgaaatatcgatgtctgacatattcatttttaccatgagtgctacaaaactgtgttatacagcacaaaagtaaaaagaaaaaatgagaaaatgaacgaatctataaaaagattgcacaaaagtgggagctttcgtgcaatcttgcagacattttatttggtaaacaacagttctctatatttaggcaacggccatatttcgtcatccacttccatctccaggtggtcgatgtggtcgcggatttggtcaagatacgggcgtactttttcttcgtatgcgaatgccctttctttgtagttttccatgtggttggctacttttcttgcttcggtcatgtcgcgcacgagtactttgatagaagtgacccggtgtgaaatctcacgaatcagttctttacggtcggcacttaatacttcatattcttcagccgggaatatttctttcagtccgcgaagattttcgagcaaacggttctgataggcaacggcagttggtacgatgtgattgatggcgaggtcgcccaatacacggccttcgatttgcaccttcatggtgtatttctccagttccacttccagacggctgttcaattcggtctcgttgaagatacgttcgccgataagtactgatttggattggttatcaatatagtgcatcagggcttccggtacgtggcagatattagtcagtccgcggcgtgcagcttcttgtttccattcttcggaataaccgtccccttcgaaacgaatcggctcggaggcgataattgtttctttcagcaggcggaagatagcttcgtctttgccaactccttcttccatcagcttttctaccgatgcccggaattcgttcagctggtttgccatggccgcattgattgcaatcatagaggcagcacagttggaagaagaacctgcggcgcggaattcgaaacggtttccggtgaatgcgaaaggagaagtacggttgcggtcggtggtatccagtaaaatttcggggatacgtccgatgcctaacttcagtgtggttttttcttccggcgtcattttctcatttcctacctggcggacaatttcgtcgagagtagacgagagttgtgaacccagaaagcaagagaggatggcgggaggagcttcattggctcccaaacgatagctgttgctggcgctcatgatggaggcacgcaataaatcctggtttttataaaccatcattaaggcgtttaccagaaatgtgaggaatagcatattgcctttcggattctttccgggagcgaacagattgataccggtatctgtgcagagtgaccagttgttgtgcttgcccgaaccgtttactccgctatatggcttttcgtgcaggagtacattaaaatgatgcttcctggcgatacgcttcatcaaatccatgacgagctggttgtgatcgttggcaaggttacagttttcgaaaataggggccaactcaaattggttgggagctacttcgttatgacgggttttggcaggaataccgagtttgtgacactcgatttcgagttctttcataaatgcagtgacacgtggagggatagagccgaaataatgatcctccaactgttggtctttggcagaagagtgccccatcagtgtccgtcctgtcaggcagaggtcggggcgtgcattatataaggaggagtctacaaggaaatattcctgttcccatcctaaattggtatatacgcgtgtgatgttcttgtcgaatagctgacagacttccgttgctgctttatctacagcggcaagtgctttcaacaatggagttttgtaatccaacgcttcacctgtataagaaatgaagatagtggggatacaaagagtggtatctactacgaatgccggtgaagaaacatcccaggctgtatatcctcgtgcttcgaaagtgttgcggatgccgccgttagggaaagaagaagcatccggctcttgctggatcagtagttttccggagaagcgttcaatcactccgccatcttcgccgaattcgataaagccgtcatgcttttcggctgttccgtctgtcagaggctggaaccagtgtgtgtagtgagtgacgttgagtgacttagcccaacttttcataccgttagcaattaaatctgctatttcacggctgataggcgtacctttttcgatagcgtcggttacagctttgtaagcttctttgggaagatactcctgcatcttcttgcggtcgaacacgtggctaccataataatcagagagtttgttggaaggggcaataacttccagaggtttccggttggaaagctcttgtaaggcaaaaaaacgcatttttgacataaatggtctatttttttatcggttgatggcgcaaaattatatgttttttctgaaagtacccctattttagagggggtattttgaaaaataatgtgtttttctaaaagtaccccctctgttgattctccaacttctattcttattgttgctgttcgttgatttctttagccatctgtttaaccaaactttccacttggatataatggttgtgatagttcttgaataacagtttgaacactgggctgttcacagccatttgggtaagaaattgtaggtgtttacccatagaggtgttcatctgcatacgctcttttttgctcaagttgtcttgtagggagtaaacaccgcatgaaatttggatttctgcaatgccttcatcccaaggatgggtgttgaggtgagtcaatgctgccaggatttttttcaggtctttcagcagaatgtttaaaagttcgaattcggtgcggtttatggagcaggaatccgggttcaggaggaaagcgaatttaaggtagaaatcctttaattcttctttaggaataacaaatgaatctttggaagcctttatcatgcctcccaccgctggttgaacggtaacttgttttgtttccataatataattatgaataaggtggtaggcgaagattttctatgaaataagagcggttccgcctttcccgttactcttcaccaaccaggcagtgggtgcattaacactccacacgggggtacgaaaccgccatatgaagcatcaggacaggcataaaaatgcctgccacgaaacgaggcaggttccctgcctggttgatatgaagagtatcgcaaagatacgacaattttcttctttgtcaagaataaagtgataaataaaaagatagaagggttgatttagtcattaatatgttttcagggggctcttatatttacagatattggaactttgtatttttcccattattgttgaaatccccttcatattataacttcttccatacaggttttattaattcctctttcaacctatcaccgctctgtaagtgcgatgaataaagagttttagaaaggtggtgataggttgaaagaggattttcgttttttatatatgaagagaatagcagaatatgcagagcttcctgcatttatttcgagacaaccgcgccaaagatttagttcatctccatgttattttgaataatgtgaaggttttcttctgataactctttttagtgtccaacttctcttgcttttcgatattcttttttatatttgcctacgttaatgaaggagatacgacgattgagagataaaatattgataggatgcatattgtgtctgttctcttttataccaaaggggacagccaataattatataatgaatccttatacccatcaggaaatctctgctgactccattatagaacgtgtgatgacttttgcacctttgtatgaaacgatagtcagtgattatcgcgcgaacctatatataaaaggtaagatggacattcagaagaagaattttattctccgttatgtaccttctatgtttcgtttgcaaaagggtgttcgcgaatatctgcttgaaacatatagtgatcttcattatacggctcccaatatttacgatcagaaagtaaaggcttcccagggaactgtgagaggaaataggggattgcctggattgctcgagtactttaatgtaaatatctactcttcttctttattgaatgatgaacgcttattgtcaccactggccaaaaacggacagaaatattataaataccggatagacagcgtgatgggagatcctaacaatctggattatcgggttcgctttatcccccgcactaagagcgatcagttggtgggtggctatatggtggtcagcagtaacgtttggagtgttcgtgaaattcgtttttcgggaagatcggagctgataacatttacctgttggattcagatgggagatgtaggcaagaaaaatgaattcctgccggtgcgttatgacgtagaagctcttttcaaatttctcggaaataaggtggatggtaattacaccgcttctttagattataaatccatcgaactgaaagaaaaaaaggtgcgcaagaaagagaagagaaaatataatctttcggaatctttctctttacagtgtgacacgaacgcttataagacggacgcctctacctttgctatcatgcggccgattcctttgaatgaaagtgagaaaaaactatatcatgactatacgcttagacgtgacacgacaacggtagaaaagccgtccaagagtcaggccttttggggaacgatgggtgatttgatggtagaagattataaattcaatttgtccaatatcggaagtgtgcgattttctccgtttatcaatccgctcttattcagttatagtggaagcaacggtttgtcttatcgacaggattttcgttataaccgtcttttcagaggggataaattacttcgcattgtgcctaaactcggatacaactttacgcgtaaggaattctactggtcattgaatgccgattttgaatactggccgcagaagcggggattcttccggttgaatgtgggtaacggtaaccgtatttatagtagtaaagtgctggacgaactgaaagctatgccggacagtatcttcaatttcgatttaattcatctcgattatttcaaggacttgtattttaacttccgtcataccgttgaagtagtcaacggactggatatcggtctggggttctcggcccataaaagaacagcggtagagccttcccgctttgtaatcactggcgattatccgatgccgcccccggaatttatggataaattcaagaacacttatatcagtttcgctccccgcatccggatagagtggactccgggactctattattatatgaacggaaagcgaaagattaacctccattctttatacccgactttctcggtcgattatgaacgaggtattaaaggagtgttcaagagtacgggtgaatatgaaagaatagagtttgaccttcagcatcaaatccggttgggattgatgcgtaatatttattatcgtttcggattcggagcattcaccaatcaggatgagttgtattttgtggactttgccaatttctcccgccataatcttcccgtaggttggaatgatgaaatcggcggagtatttcaggtgcttgactcacgttggtataattcctcccgccgttatgtacgggggcatttcacctacgaagctccgttccttattctccggcatctgatgaagtacacccgttatgtgcagaatgaacgtatttatatcagtgccctctctatgccgcaccttcaaccttatctggaagtaggatatggcatcggtacgcatatttttgacgtaggagtttttgtgagcagcgaaaattggaaattcggaggaataggctgtaagttcacgtttgagttgttcaaccgatagttttcttcgttccggttgttttatcgaaagattttacttatctttgtataagagaggatgagggcaaaatttagcatcaaagaggtgtagtcgcctcataagcacaggtattttcctagaaaataaattctaaggtataaatacctaaatttattttagtaataactcatcctctcttctctcttttttatatgcatatacaaaatggacggaattttaataacgatcattgttatcaccgctttcctggtttataagatgatttcctcaagcaggaaacaggaggggtataaaagatggaaagcaacaagcagtggtaaggaagaaaagactactaaggtaaaatgggaacacggagcctggcttaggcatgctttggggggaactgttccgagagcgcagtatgttcaaaagtttgatgaatcggctgttgtttggtgtgccaacttgttgggagtggaaacggcacggttgaaggaaattctacgggatgtttccgaacattaccgggagttctggatgagaaaaagaaagggaggttatcggatgatttctgctcctgacaaagaattacaatctattcaaaccactattaattctcgaatattatcatctgtgacaatgattcatccggcggcagtaggtttccggagcggtcattctgtggttgataatgccagtccccatctgggaaaacggtatatcttgaaaatggatattcatgattttttcttttcgatacggagccggagggtgaaaaagacatttgagaagattggttatccggaaaatgtgtctaaagtattgggagtgttgtgctgcttgtacaggcacttgccgcagggagcacctacaagtccggcgttaagcaatatcgtggggtatgagatggacaagaaattggctgcactggcagcggaatacggactgacttatacccgctatgccgacgacctgactttttcgggagatgtgttccccaaagaacaaatcattccccggatcaaacagatcatccgtgatgagaaattcgaaccgaatcataagaagacccgttttatcaatgagtatggcaggaagattattacaggagtatctgtttcttccggtgcgaaactgacaatccctaaagccagaaagagagagatccggaagaatgtctattttatcctgacgaaaggcttggcggaacatcagtgccagattggctcgagtgatcctgtttatctgaaacggctgattggagaactttgttattggcggtcaatagaaccggacaatgcgtatgtatccgattctattaaccgtttgaaatgtttggagaaagggtattaatctaattggcaatcgttacccgttcattttctatcttggcgtaattccttttcacagcttcgcgaatacctctttgcatggcagcgtctatgttcgatcccatacgggcaaagccgaactgttgtgcgcatgcttttatcaaatctgccgcaggcaggctgatggagtcggtcaatagttgccggatggcattggctatttcttcaggtggtatgtctgtcgcttcccggtcggaaaccgggcgatagattgaataggaagcgcattgctctttgtcgttccagcagaagacaagtccttcgtattctgtgcgatagatattcaatgtgtcgagtgctgtttctatctgtgcctctacccgtgttcccaagcggctgattccccattcggacaggattttcttacagagcagggatttactgattggcgcctcgctttccataatcttccgtatttgggagaggaggatagcgtaactgtccgtaaagaaaaagtcttccggtgaataactgtatggggtgatctttgcaaacttgtacttttgttctatccggttttgagtagaaagaacggaagctgcttgcttttcaggagcaacaggcgatgccttgagtacaaatgaaatttcattgttggttatctgtgccgtcggtgcaggtgctgccacttctgtcggagtagaattgatttcggctgctgtcattgaaccgacctttgaattctttttccgggcgatagcctcttggatagttgccattacttcgtccggcttttcccaccagtccattgtccatatccggtagatgtcccatccgagtgctttcaatacattattctgcacaatttcccggtcacgtgcggtcttggtacgtttgtagtttttgccgtcgcagataatacctaactgatagttagaggtattttcggtgtcgacgatacctatgtctattttgtatccggagcaaccaatgtctgtatgcacggtgtaacccaatgagcgcagtctgtcggcaatgatcgtttcgatggaggctgttgcttccgacagttgtcttggcacactgctgatggtgctccgggttcccttctccgcatattcgaggaaacgttttagtccggctactccaatagaagaagtccggttcaggtcgatcatatccgaccttagggtggaatagataatcatctcataccgggcacgggaaacggctacattcaatcttctttcgccgcctgcccggttcagtggtccgaaattcatgctgacgcgcccttctgcatccgggccatagcccacagagaagagaataacatcgcgttcgtctccctgcacattctccaggttcttgataaataacggttcgtcgcattccagcgcaagagtttccagttcggggtaaaagataaaaaggtcggataataagtcttctatcaaggcttgttggacaatgctgaaagtgactacaccgatacttttctttcttaattcctcgcttctcaatcttctggctatttcgtccaccacagcttgagcttccgcccggttctggcgcgacttgcctttatcatagtaaccgttgatgttgactatcctgactttcgattcaatgttgtccggtgaggggaaagtcatcagtttgttatcgtaatattcggagttgctgaaagcgatgaggctctcatgtttgcttcggtagtgccataataaatatttggaagggatagacagagcgagacagtcgtcaaggatactctccaaatcttccatttcaatgttgtcttcatcaatggtgttgaccgagaagaaactggtaggaggcatttgtttcgggtcgcctacgataatgacgtttttaccccgtgcaatggcgcccaccgcttcataagtaggcatctgtgaggcttcatcaaagacaatcaaatcaaatttatcagcgtccgtatcgatgaattgagcgacggaaagaggactcatcagcatacatgggcacatgcgcgacaacaaagtgggaatttggtcgaatagcttgcgaatagatatgccgcgggcattgttgcggatattcttttgaaggatacccacttcggaactttggatggcctcgtgagtgaaagacggaatgttggaggccaaccgggcaaataattctctttgcgtcgtttcttcgaatttggcggatatttgtttgtatttagcaatgatgtcattgaatatcttaccgttgaataattccagagtcggctctttggcaatgatataccggatagctgcctgatagaaactcttgcggaagctgtctgtaagttggctggtaggaatattcttttctttatattccgtcgcgataaatcctattcccagactatgcagggtttggtaggcttgtagccactgataccagtccttgagcttgtcgaggttctctttccaggttcgggcttttgacaaggcaatcgttatccagtcggctgaatcggtataaagttcttcgatcgagatacccagcatgccggacaatttcttttcggtggctgtgagtgtatctgcgagctgatacagttcattgaaagaatgagcatggatgtctctgaatgtttgaattccttcagtgagttgtgcggacaaattctgcttgatttgcgaaactttggcaatgtcttttgcgtagttcaacaaatgcgaatgaagggaagtcatgtcgtcgattatctgctcaatggtgttccaatcctcgttcttgccggggcgtccgaatagggagggaagttgcccgatgtatttccggacggcttctgcttcttcctgataccggataatgcggtggagcagaggtttgatgtcttctgtttcaatcgtttttaaagcatatacgttgattgcctttctgattttccgttgtccgaaatatctgggaaggaaccattgatcggatacccggttccattcggctaacatctgctttgcgttgatggacaggatttcttgggtgaatccggtttctatctctttcctttgttcatcccgtttccgtccgtgaaccactacttcccggtattcattcagtgtttcgttgagcaatggcaaagtcagcaatccgggagtcagttctggaatgtcgagtattctccggatgatgtgggagattgtctggaaatccttgcgtgtagggtgtatatccgtatcttttagaagtatggagaatacatccagcttctgccggatggtggtcaacaggtcgataaatccggtgagcagttgggaggatccctccttaacggctgatgaatattcggtaatcgagataccggttaatggatgctggtaaggatgtccacacgcattggccgtccggactagcagctcgatggcatcttcccattgggcaaatgtgtctttatctaatgtatccagataagcttgtggaatatcaaaacaagattcgacgtccacggattgataatgaataatggcgtcatataatgaaactccgaacgggtattctttatgcagggcttcgatatattgattcaattccgctcgtaaattcagcaggcgttccgcttcctttctgaattcttcgggaggtgtctgcctgataatttccgtggtttcttttagttgagagataacggcggatttctttgtcttgttggaatgaatttccagacagaacggagccagcccgatagctgccaatctgttttgcacaacggagagggcggccatcttttccgctacaaataaaacacgttttcctttgtaaagcgcgttggcgataatattggtaatcgtttgcgattttcctgttcccggaggcccgtgcaggatgaaagtcttgtcgtgtacggcttcgtagatggcttccagttgcgaagaatcggcgatgatgggtaatacaatgtctgcgggcgacacttgtttgtccatatccgttgcatctatttcctctgtggcggcttcccactctatctttccgttgatgaggctggacacaatcttgttctgaaccagtttgttggcattgttgtgaatgtcattccacataatgaacttgttgaaagagaagatacccagaatcgcttgctcttccacgtcccatttacgctggttcttgatgctgttgcggataatggaatagatcagtttgacgtttacaccgctttcgtcggtaggcaacgggtccaatcctgatatggagattccgaagttttggcgaagcatttccaataaggtgatattcatcatcgtttcctcttcccgggagcggattacgtaacctttggctgccgatttacggataatttcaaccggtaatagcaagatgggggcatatcgggggcgttcgctggaaggtgtctcgtaccatttcaaaagtccgagagccagatagagtgtgttggctccattctcttcgatagaagtacgcgaagagcggtataagtgagtcagtgccttacctaaatcgttttcgggcagatagaaacgtaaccttttctgtgaaagttccgagttgatgaaaccaaccatgggatcagactccggtatggaggaataaatcccgaaatccatcgccggactttcccaatcggcagggcggtggaggatgcggaattcttctccgtcggccaatgcatcttccagacaggatagattagccgggatgagttggagcgtgtttttggtaatccggatattcagcaggttgttgcgcaggcttaaatccagcaaccgtctttcccataacagttgtttggtaatcacggcctgggtttcattgcccgataaatcatacggattgatactttgcggagtggcatgaacggcacttctttgaatgtcggtctccttttcttctactccccatacctgcccgtgcagagtacgttgggggatggggcggatgcccgaatgtctcgctcttttcacatctatggcaagaatgaaactgtttccatccgtcagctttccgttcgctttcttcactgcattgtcgaaatcggacgaatgtcccatgttcatgcaggtcgtttcaactaaagtaatgtcgtatattccttcggctgtccgtttggttaacagggaaacatcgtcaatggtaggatccggaaaagtctccggcactagccaggctcccgcaaaagtatgcccttgagtgatgataatgagtgcattcagaccgattgcttccaggcaggaagcatagagcaaggccatatccagacaggttcccagtttttgtgccattacggagtcggctagccgtacacgttgcccatattcctcgaagctggcggggatggtgctgtatataatctgttgttccgtgatagccgtgtagatggcggccatctgtttccttacccggtccggagtgcggctttgatattcgtcgagggacggattatcagtccattgtcccaggatggaagcggctctcttgatgattggcacaatggctgtatgattgggggtgatgaaagcggccagcatttcgggcaatacattgagccctccccattggtcgtatgccagaatgtcgatagggtaggtttggcagaatacggattctgcttcggaagtaatttcaattttcagattgccggataaacgttcggtcagctgtgtgaaatagttggcggacaaagtgagattgaatgacgacaggcatatcgattcattgggcggaatttgtgccacagctatcggagcggcgtttccgaaagtcggttctgtcgtgatttgtacctgaatgtccttcagcggggcaggcgttgtattctcaatagaaagctgatgaatgattgatgcaccgttttgttgtatcgcaaaattaataagcggtaaatagtcgcattgcaccttgactttgtccaatctctcgtccatggcaaaaactgtataaattaaagattgcaatattacaaaaaatacggatataattctcttttcttctgccattcttttgtcaatcaagaaaatattcctacctttgcgcccgatttatagataatataatgtcttatttaattaaagtattaaacaatttatttattaatggaaaacttaaagaacgtagctcctattgaagatttcaactgggatgcttatgaaaatggcgaaacagtaaccaacgttagccacgatgaactggaaaaagcttacgacggtacgcttaacaaagtgaacgaccgtgaggttgttgacggaaccgtaatcgcaatgaacaagcgtgaagtagttgtgaacatcggttacaaatcagacggtatcatcccattgaatgagttccgttacaatccggatctgaagatcggtgatacagtagaagtatacatcgaaaatcaggaagacaaaaaaggacagctcgttctgtcacacagaaaagctcgcgctactcgttcttgggatcgcgttaacgctgctctggaaaatgaagaaattatcaagggttacatcaagtgccgcactaagggtggtatgatcgtagacgtattcggaatcgaagcattcttgccgggttctcagatcgacgttaaaccgatccgcgactatgatgtattcgttggcaaaacaatggaattcaaagtggttaaaatcaaccaggaattcaaaaacgttgttgtatctcacaaggctcttatcgaagctgaactggaacaacagaagaaagaaattatcggtaaacttgaaaaaggacaagttcttgaaggaactgttaaaaatatcacctcttacggtgtattcatcgaccttggtggcgtagacggtttgatccacatcactgacctttcttggggacgtgttagcgatccgaaagaagtggttgaactggatcagaaactcaacgttgttatccttgacttcgatgacgaaaagaaacgtatcgctcttggcttgaaacaactgactccgcacccatgggatgcgcttgatactgacttgaaggttggtgacaaggtgaaaggtaaagtggtcgttatggctgactacggtgcattcatcgaaatcgctccgggcgtagaaggtttgatccacgtttcagaaatgtcttggagccaacacctgcgttctgcacaagatttcatgaaggtaggcgacgaagtagaagctgttgtgctgacacttgatcgtgaagaacgtaagatgtctctgggtatcaaacaactgaaacaagatccatgggaaactatcgaagaaaagtatcctgtaggttctaagcatactgcaaaagtacgtaacttcactaacttcggtgtattcgtagaaatcgaagaaggtgttgacggcttgatccacatctctgacctttcttggactaagaaagtaaaacacccatcagaatttactcagattggtgctgacatcgaagttcaggtattggaaatcgacaaagaaaaccgtcgtttgagccttggtcacaaacaactcgaagaaaatccttgggatgtattcgaaactgtgttcactgtaggttctgtacacgaaggtacaatcatcgaaatgttggataagggtgctgttgtagctcttccttacggtgtagaaggtttcgcaactccgaaacaccttgtaaaagaagacggttcacaagcacagttggatgagaaacttgaattcaaagtgatcgagttcaacaaagacgctaagagaatcatcctgtctcacagccgtatcttcgaagatgtagctaaggctgaagaaagagcagaaaagaaagctgcttctggtgctaagaagtcatcttctagcaacaagagagaagattctccgatgatccagaaccaggctgcttcaactacgctgggcgatattgacgctcttgctgcattgaaagaacagttggaaggaaagaaataatctgaatagaatattttccaatgaaaggcgctcccgtttgggggcgctttttttattcaccacagatttaagaaatgaagataagagggaatttaattcagacataagaacaaaagaataaaatagcagttcaataagcaacagaaataattttcaaagcgctgcctttatgttcttttgttcttatgtctaaaaataaattatcaaaatctgtattaatctgtgtaaccctggggtgaaatatttccttttcctttgcaagattaaatgtgaaatgtcctatctttgcataccatggaaaaatttgagttacatatattgggatgcggttctgctttgcctactacgcgacattttgcgacctctcaagtcgtaaacttgcgtgaaaaactatttatgattgattgtggcgagggagcacagatgcaattacgccgctcgcgactgaaattttcccgattaaatcatatcttcatctctcatctacatggtgaccattgtttcggattgttgggactgatctctacattcggattattagggagaactgctgatttacatattcattctccaagaggactggaagagttgtttgcgccgatgcttgctttcttttgcaagactttgacttataaggtgttcttccatgaattcgaaacgaaagaaccgatgctcatttacgatgaccgttcggtgactgtaaccacaatccctttaaaacatcgaattccctgttgtggtttcctttttgaagaaaaacagcgtcctaatcatatcatcagagacatggtagacttttataaagtcccggtctatgaactgaaccgcatcaagaacggagcggattttgtaactcccgagggagaagtaatacccaatttacgtttaacccgcccttcggctccggcgcgtaaatatgcttattgttccgatacaatctatcgtccgtcccttgctgaacaaattaaaaatgtagatttgcttttccatgaggccacctttgcacagaccgagcaggcacgcgccaaggaaacttatcataccactgctgcacaagctgcgcagcttgctttggatgccaatgtgagacaactggtgatcggacatttttccgcccgttatgaagatgaatctgtcttacttcatgaagcgtccgccatttttccacaaaccattttagcgaaagaaaatttgtgtattgacgttgatggagggactgtctatgaaaagtagtcgactgctttggggagtaatcatcctgctcttcggttgcttggcagcctgtaaaaaagagaaacctcaatctccgataccggattctttgtcttccctccaggaactgttccatcctgcttatcaaataaatgcagacagcattcatcagatgattcgtatttgcctgaacgaaaatccggtaactccctgggattcggttttgctggcacattatcaggaaaaggatgaattcttttggctgaacgattctctcatatccgataaacctgccgtacaggtggcagactcgatgttattctggttaggaaacatttcacaacatggagttaatccgaatctgtatcctgtcgatagcatccgtgaggaattgcaacagatacgaaccttgaaactgcgtgaagggaaaacgatgaaccgtctgctggcagacgtggagtatcagttaacagccgcctatctttcgtatgtgtgtcaattgaaattcggattcttgcctccggagcgcagatggaatgattcgatcgaccacattcctttaaaacaatgtgacgtgaagtttgcaatggccgctctcgactctttgcgtgcaaatcctaacgccgcttttcaccgggcgcaacccgcttccccgctttatcataagatgcaggaagagctggttcgtgtgaatggctggggagtgacagatactacggattattatcgcgaccgcctattggtaaacatggagcgggcacgttggcaatatgcattggataaaggacgaaaatatgtgatagctaatgtggcggcatttatgttgcaagccgtcaacgaagaaacagactctatcctggagatgcgtatttgtgtagggactgtgaagaataaaactcctctattgtcaagcaggatttattatatggaactgaatccttactggaatgtgcctcaaagcataattcggaaagagatcattcctacttaccgcagagatacgacgtattttacccgtaaccgcatgaaggtatacgataagaatggatttcaggtagatccccacagtattaaatgggcgaagtatgcaggaagtggcgtaccttatacggtgaagcaggacaataaaacagggaactccttgggacgtatcatcttccgttttcccaatcctcattccgtatatctgcatgacactccgtcacggtgggcttttacacggaataatcgtgcggtgagccacggttgcgtccgtcttcaaaaagcactcgacttcgcgttcttcctgttgaaagagccggaagaattgttggaagaccgtattcgtattgcaatggatatcaagccggtgagtgaagagggaaagaagctgcccatcagtgcggcttatcgtgaattgaaacattatagtttggaacaatatatacctttatttatagattatcagacggtttatctgtctgccgataataatttgaggtattgtgaggacatttataaatatgatccgtccttactagaggcgatgaataacctgaatttgaaaccataaataaacatacagatacgagagattatgattccttataacgaacgcgaagttctgaaactccttcaggaggagagtacacagcggaaaggatttgaaatgattgtggggcagtatagcgagcaattgtattggcaaatccgccggatggtactgtcgcatgaggatgcgaacgatctcctgcaaaacactttcatcaaggcatggacgaatatcgattatttccgtgccgaggcgaagctgtcgacctggctctatcgcatcgcgctgaatgagtgtcttacctttctgaataagcagcgtgccatgactaccgtggatattgacgatcccgaagcagtagttgtgcaaaagctggaaagtgacgcctacttttcgggcgacaagatacagatgtgcttgcaaaaagccttgcagactttgcccgaaaagcagcgtatggtgttcaacctgaaatactatcaggaaatgaagtacgaagagatgtcggagatcttcggcacgtcggtcggtgcactgaaagcatcttatcatcatgcggtgaagaaaattgagaagtttttagaagaaatagattaaaccttttaaatgagacactgtctaatgaaaagagaggagaaaaacgtatgaaagaagaagatattttattgaagaagcttggaaaggaaaattccttcaaagtgcccgatggttactttgagaacctgacttcggaggtaatgaataaacttcctgaaaaagagaaagttgcttttaaggaagaacctgtcagcacatggacaagactgaaaccattgctctatatggcagctatgttcgtaggggcggccttgattatccgggtagcgtcaacagatcataaacctgctgcagcagatgatgtagcggtgacagaagtggatactgaagtagtcgtatctgacgaaatgattgatgtagcagtggatcgtgccatgctggatgattattcgttatatgtttatttgagtgatgcaagtgtagaatgatttataaaaactgattgaatacagaaaatgagaaaacttatcgcattggtcgttttgttatgtggctttatgcctgttctttgggctgctgatggatgtgatcagcatttatcccgggaggagttcagggcaaaacaaaaagctttcattatcgaacaggctggattgaataaagaagaagcagccaagttctttcccgtttattttgaactccaggataaaaagaagaaactgaatgatgagtcatgggatttgatgcgcaaaggcaaggatgataaaacgacggaagctcaatatgcagaaatcaatgagaaggtagccaacaaccgtattgctgccgaccagcttgataaaacttatttgggtaagtttaaaaagattctttcaagcaagaagatttttctcgtgcaacgtgcagagatgcgttttcaccgcgaaatgataaaaggtatgaatcgtagcaaagacaagggagacgattcaaagaagaaataaagaaaacagagcgtccgattcgtatgaacagacgctctgtttgagtaaaatggaggctctgtccggtgggaatagagcctctgtttttttatgtcggtaaggaagttacagtccttttttctttgcttcattccaaatggcatccatctcttcgagagacatatctttcagactttttccttccttgatggtgtgctcttccagataattgaaacggcggataaacttctggttggtaagttctagtgcattatcgggattgattttataaaggcgtgccgcattgatgaggctgaacatcacgtcgccgaattcagcttccgctttctctttatccatgttggccacttcctcctgaaactcacctatttcttctttcactttatcccaaacctgttcccgttcttcccagtcgaaacctacattgcgggctttgtcctgaatacggtaagccttgataagcgagggcagggcagcgggcacaccgcttaatacactcttatttccatctttctctttaagtttcaactgttcccagttctcggaaacttgtccggctgtatctgctttcacctctccgaagacatgcggatggcggaaaatcagcttatcgcacagcttgtcgcaaacatctttgatgtcaaaatctcctgtttccgagcctatcttagcatagaaagcgacgtgcaataatacgtctcccaactctttgcagatttctttcttgtcatccctcatcagggcatcgcaaagttcgtaagtctcttctatggtgttgggacgcagactttcattcgtctgtttacggtcccagggacatttaacacgcagttcgtcgagaatgtccaggaagcgtccaaaggcttccatctgttcttgtctggtatgtgacataaatctatctatttaattcatttttttccattcctggtaagaaatcaataaccctactacttccgagtagttctggcggccactttctatcttgtttcctttcaggtaaagatcgtatatccaatcctgtacggctcccactaccgggctatacttggcagcccaataggcttgattattcttggctaattcaataatttccggtcggatgcgttgaaagagttttgcatattcttcttctgaaagtaatctttttgcattccccagtacatgccccagtacagagaaatatccggagaaacggatacccattgcctgtgaacgggtacaaacctgataggcatagaaattggcttccgcttcgctggtgatacctaacaagtgggctagttcatgagcataagtggcggggtagttagcgggaagcaaatctccgttaagggtgaattcgcagaagaaaggtcccatgctaccggttactcctaccatggaaatgaacggagtaaacaacatggtctttactctcggatgatcgtgtggaggtcggtgcacgcccaagctatcacttaactgattatagattcgtacggtttcttcccgtatcaaatcctggttgatactatttacaggggtgtacgaacgatttaattgggtgatatagtcgtcaacgaactcctgaaaattttcgggagtgtaggctgtatacgggatttcggttcgttggtaaaagttcttttgagaataattcagtccccaagccagatagaaccatacataaatccacaacagatattcgccgtcgcgcaataaaactttcttccaaggcaactttttgcggagacgggcataaataggataaataatcacgcccgcgatactaaggaagataaataagtctcctatcgcaaaaggaaataaattggaaaaaaacgacaaaacgtaagagataaaagggtagattgtttgcgaatagattgttgccagagcaggaatccattgcgttagccacaccaggattaagattgctcctaaggctaaatatcttacatttggcttctttttcatcatttgtctaatatcagtcaacaaaaatatgcattaaatagacgtcgcgcgaaaaaatacctctatatttgcaaaaaatctgttaacaatggctttataacttgtataatagggaaagtcattcaacataaaccggataaaagatggctacatcagaagaaattgaaaagtattgccggaattgcgtatcacgtgatttcgtgaatggtaaaggtcttgtttgtaagcgcaccagagaacttcctgcttttgaagaagaatgtgaaagttttgagaaagatgaagagctggaaagattagcccctcccaagccggaagacttcccggtatctatgacagaagaagaaatgcttgccgaagagaatctctccaaaggagtactgtacgcagtcgctgcctgtattgtgggtgcggtggcatggggactgatatctgtttctacgggtcgtcagattggatttatgcccattgctatcggatttatggttggctttgccatgcggaaagggaaaggaatacgtcccattttcggaattatcggtgcggcattatccctgattagttgtgtcctgggtgatttcttttccattatcgggtatatttcccaggattatgatatgtcctatttcgacgttctggtaagtgtggactatggagaaatattctctattatgctggaaaatgtgatgtcaatgactgctttattctacggattcgctctttatgaggggtataaattctctttccgtgcacagaaacaccccgagggtggtaagatttgaatttaaattattaattttgcacccgttatttttagaatatacattatcatatatacataaaacaatatggaattagcaagtaagtacaatcccgctgacgtggagggaaaatggtatcagtattggctggaccatcatttattcagttcgaaacccgatggacgtgaaccttacaccatcgtcattccgcccccgaacgtcaccggtgtgttgcacatgggacacatgcttaataataccattcaggatattttagttcgtcgtgcccgtatggaaggcaagaatgcctgttgggtaccgggaactgaccatgcttctattgctactgaagctaaagtagtaaacaaactcgctgctcaaggtatcaagaaaaccgacctgactcgtgacgaattcctgaaacatgcctgggactggacagacgaacacggaggtatcatcctgaaacagctccgcaaactcggtgcatcctgcgactgggatcgtactgctttcactatggacgagaaacgcagtgaaagtgtactgaaagtttttgtagacctgttcaataaaggattgatctaccgcggtgtccgtatggtaaactgggacccgaaagcgttgacagctctttctgacgaggaagtgatctacaaagaagagcacggaaaactatattacctccgctataaagtagaaggtgatccggaaggacgctatgccgtagtggcaactacccgccctgaaacaatcatgggtgacacagcgatgtgtatcaacccgaacgacccgaaaaacgaatggctgaaaggcaagaaagtgatcgttccgctggtaaaccgcgccatccctgtgattgaagataattatgtagacatcgaatttggtacaggttgcctgaaagtgactcctgctcatgacgtaaacgactatatgctgggtgaaaagtacaacctgcctagcattgatatcttcaacgataacggtacattgagcgaagctgccggtatgtatatcggcatggatcgtttcgatgttcgtatacagatagagaaagacctcgaagctgccggactgctggacaagacagaagcctatacaaataaggtaggttactcggaacgtaccaacgtagtgatcgaaccgaaactatctatgcaatggttcctcaagatgcagcattttgcagacatggcattgcctccggtaatgaacgatgaactgaagttctatcctgcaaaatacaagaatacctaccgtcactggatggagaacatcaaagactggtgtatcagtcgtcagttgtggtggggacatcgcattcctgcttacttcctcccggagggcggttatgtggtagctgctacagcagaagaagcattggcaaaagcgaaagagaaaaccggcaatgccgccttgacaatcgaagatctccgtcaggacgaagattgtctggatacctggttctcttcctggttgtggcctatctctttgttcgacggaatcaacaatccgggtaacgaagaaatcaactattactatccgaccagtgaccttgtgacaggaccggatattatcttcttctgggtagcccgtatgattatggcaggctacgagtacgaaggacagatgccgtttaagaacgtttacttcacagggatcgttcgtgataaactgggacgtaaaatgtccaagtcactcggtaattctcccgacccgttggagttgatcgagaaatacggagccgatggagtgcgtatgggtatgatgctttccgctcctgccggaaacgatattcttttcgatgacgcactttgcgaacagggacgtaacttctgcaacaagatatggaatgctttccgtttgattaagggctggacaaatgccaaaggcactattgaaattcctaccgatgcacatctggcagttcagtggtttgaccaaagactggatgcggcagctgttgaagtggccgatctcttctccaaatatcgtttgagcgaagcgttgatgctggtttacaaactgttctgggatgaattctcttcttggctgttggaaatcgtgaaacctgcttatggacagcctgttaatggctttatttatagtatggttcttagctctttcgagcgtctgcttgaattgctgcatccttttatgccatttatcacagaagaattgtggcaacaactgcgtgagcgtgaaccgggtgaaagtttgatggttactcaactgtttgaaccggtcggagcaaatgaacaattcctggcagagtttgaagtagctaaggaaatcatcagtaatgtccgtagcatccgtttgcagaagaacattgctctgaaagaagaactcgaattgcaggttgtaggcactcatccggtagagaaattgaatccggtgattatcaagatgtgtaacctgtcttccgtaacagtggtagaaagcaaatcagaaggtgcttcttctttcatgataggaacgaccgaatttgccgtgccattgggtaatatgattgacgtggaagccgaaatcgcccgtatggaagccgaattgaagcataaagaaggattcttgcagggagtgatgaagaaacttagcaacgagaaattcgtcaataatgctccggctgccgttcttgaactggaacgtaagaagcaagccgatgcagagagcatcattaattctttgaaagaaagtattgcggctttgaagaaatcataatcctttgatacttaattttatataataaagggcatctcaattcgttttgggatgccttttttttgcactaaagaaattaatactatctttgcttccgctatttatagaataccacaaatgaaacaatcgttacggatcattccattcctccttggattattcctttttattgaagggttcttatcacctgcgtcagcccgaaccgaaaatacaaataaagaagtactggttttaaactcgattaatttcaatctgccttgggctaaaaacttttattggtgtcttcatgatgctcttcagaaacaaagaatttctgtgaaggcggaatcgctttccgtacctgctctggtgaatgagatggaggcgaatgccgtagtcacccatttgcgtcagaagtatccggaacctcccactgctatcgtgatgattggagatccgggatggattgtttgccgcgaattatttgatgatgtatggaaagaagttccggtaatcgtgacaaatgcccgcgaccatttacctgcttctcttgaggtcttattatctcatgccccgttgacggaagccaatacagtttccggcgatgaatggaggcggggatataatataactatcttgaagcaatattattatgtaaaggagacaatcgatttaatttataaactgatacctgatatggaacgtctggcgtttatctccgacgataggtatatcagtgaagaaactcgcggagatgtaaaggaagctgtagaagagaacttcccggacttgaatctggatttactttccaccactcaattatctacagaaatgttgttggatactttacgttgttataaaccgaatacgggaatcatttattattcttggtttgagtcgcataacaaaaatgataataactatctttttgatcatattcaggaagtgattgtcaattttactccatctccattgtttttactttctcccgaagacttgtcgaataatacttttgcaggaggatattacgtttcgacggaatcgttctgtaaatctttgctggaaatacttggtcgtgtcttggatggagaacaggcacgtgatattcccggtggggcgggaggagaaggaagtgccaatctctgctatcaagtgttgaaatcctacaatataccttcttcccgctatccagacgatgcggtttatgtcaatgagcccaagactttttttcaacagtattacattcaaatactttcctgttcattctttttgttgattttgattgttgctatcatatattatatcagcattcttcggaaagcatatagtcgcctgcatgaagcaatggaaaaagcggaacaggccaatcaattgaaatccgcattcctggctaatatgagtcatgagatacgtacccccttgaatgccattgtaggattctccaatatgcttcctcatgtagaaaaccgtgaagaaatgtccgaatatgtagaactcattggaacaaatacggatttgttgctccagttgattaatgatattctggatttgtcgaagattgaagccggtacattcgatttctatcctgccttgattgatgtgaaccagacgcttgaagaaatcgagcaaagtatgcagctacgtcttcggcacaataatgtgactttcacatttgcggagagactgtcccaatgtacattgtatacggataagaaccgtttgattcagctgcttgccaattttgcagttaacgccatcaaatttacagaggtgggtactatccgtatgggatatcgtttgcttgatcctgaaacgatttatttttatgtgtcggatacaggctgtggaatgtcttctgaacagtgtattcatgtcttcgaacggtttgtgaagtacaattcctttgtgcaaggtaccggactgggactttctatctgccatacgattgtagaccgcttgggagggaaaataggagtggagtcgaaagagaacaaaggatctactttctggtttaccttaccttatcggcagaattaatgctttacttctttccaatctatcagtagataagttgctatactcttattgcaaacttcctttcccttattggataagttgtctttgaccaagaagaaactataaacgcaagttctgattgtataattgcaagttgcatttatataaccggaacttgcagttgtataaatgaagcttgcaattatagttttctcgtagccaaaaagaagtttggcagtaggggaatgcaagtttacctctaatacaacggaagttatctattagtactttaatagacagatagtaatagataagaaaatagatggttggttttaaggaaatagaatcggtagtaataatggcagataatcctttaaatctacgcgtagttgctttaatgcttgttgaatacggtaatctactgttttgggagatattcccagaatttccgctatttctttataactcatatcccggaacctatgcatcacaaaagcttcccgataactttccggcaatgtggcgatggcatccttgatgcgttgtgtcaactcttcaacttgataaagatccgtatcttgcagcatctcctgcatctcttcataaaatcgagtgtcggcacgttgggtggcatcaatatgtgcaagcttgttcagagctttgcggtatatcattttaaagaggtatgaactaagtgaagtttcgataatcagattttctctgttttcccaaatccataaaagagagtcctgcacaatttcttccgcatcttccagatctacaaaacgatgaccataagcacacagtgccggataatacctccgaaacagtgcatcaaatgctttttggtcgcctcgctgtatagcagataataggaaattgctttctgacaggtgaacttctttcatgtattagtttgatatttcactgcaaatatagcttttttataagaaaacaaagattttctgaaaaaaaatgagatttggtttaggaattccacaagtctctcttgtcttatagtaaaaggcaataaaatacgaatatggataagactgataaaaatacaatagaagaattgcttccccgttattgtgagggactggcaacggaagaagagcgtctgcaggttgagatgtggatggatgagtcggaagaaaaccggcggatggccaaacagatacatgctctttatcttgctacagataccgttcacatcatgacgaaagttgacacagagaaagcattgacaaaggtgaaaagtagaatgacaggtaacagacaaaggaaaacgacatggtgggaatgggcgcaacgtgcggcagcagtgctgttcattccacttctcgttactctgatggtacaacattggggaggaagcgaacaggaattggcacaaatgatggaagtgaaaacaaatcccggaatgatgacttctctgacattgcccgatggcacattggttttcctgaattccgaatctaccttgagttatccctcacgcttcgatagcgacacgagaaatgtaacattgcagggagaggcttattttgaagtagccaagaacccggaaaagaagtttatagtttctacttcccaccaatcacagatcgaagtactgggaactcattttaatgtagaggcttatgaaaaagaagaccggattgcagcaacattggttgaaggaaagataggttttatttattcatctgacaatggctcgaaaaaggtgctgatggatcccggacagaagctggtctatgatacaagagacagtaaagtgcagctttatgccacctccggtgagtcggaaatagcttggacagaggggaaaatcattttcaaagacacccctttagaagaaagcttgcgaatgttggagaaacgatataacgtagaatttataataaagaatgaacgtttgaaaaaatactcatttaccggaacatttacccatcagcgtttagaaagaatattggaatattttaaaatctcatcccgaattcgttggcaatacatagattctgctgatataaaagatgagaagagcagaatagagatttattgatttacaaaccttaaaaaatgaataatatgaaaaatagagctccttaaaagaaaaacatacgggaaaatattggcgtatttcccgtatgaaaaataagtaaatctttctaccgcttgtttggcgacaagcttagatatactttttattaactttaagtcattacaaaattatgcaaaattattgtagcatccaattattacggatgataaactcgttttggattaccttaaaacaaattccactatctatgaaactatttattatttgcctcatttgttctgtcagtatcacatgggctactgaagcatatgcacagcaagcaatgataagcattgatgtgcgtaatcaaacagtaggggaaatattgaaggaaatagaatctcaatccgattttgatttttttttcaacaataaacatgttaatttggaacgtcgtgtttctgtatctgctaataatagtaatatctttcaagtattgaaagaggtttttgccggtactgatgtgaaattttctgtgttggataagaagataatcttgtcaacagacataatatcacccgagcaagataaacaaatgaaagttgttggtaaagttgttgataggaatgatgaacctgtaataggagcaactgttaaagaaaaaaacggctcggggggaactgtaactgatattggaggaaactttaatttgtccgtatcatcggataatgcgatgattgatgtttcttatgttggttatcagtctcagacagttaaggtgagagaagggaaaaatattaagatagttttagaggaagatacaaaactgcttgaagaagtggtagtggtaggttatggtacacagaagaaggtaaacttgaccggttctgtagctacaatttcctctaaagatattgcagaaactcatgccagcaatacttctactttgttggcaggtcggttacctggtgtgatttcaatggcagcaaatggatttccggggcaaggagcatcggtgttgattcgtggaaaatcatcttggaacgatgcgcctgtgttatatgttgtagatggaattcaggtggataaagaagcttttgatgcgattaatattgatgaaatagaaaatatttctgttttgaaagatgcatcggcggcagtatatggttctcgtgctgctaatggagtaatattggtaacgacgaaacggggtgagaatggcagacctaaattctctttttctacaaatttgggtatttccacacctactgcctatccagaattactcaatgcttatgagtatgcaactctatggaatgaagcgcagactaatatgggatacgatataaataactcctcggacgcacatctgttttacgatgaagaacaaataagaagagcgcagacagagggatccgactggtttggagaaacttttaaaaaacattcattgaatcagaaatataatatgagtgtgaatggtgggagtgaccggattaaatattttatgtctttaggatatttacatgatgaagggatgtatgatgggattgattataaacgttataacttgagagccaatgttgatgctaagattaataattatataaatgtccgtttggatttggaggggatggaaagcacgttggaacaaccacaagttagttccgcctcactttttgaatatgttgtcagacggagtccgatggataaaatatataacacggacggtagctactatgatatgggtagcagacatccgttggcagaacgtgatgatagcggatataaaagaaataaaaagaacaattatcgtgcaaagctgggttttgatataaaaattccttatgtggatggtttaaaatttaatgctttgtttagttacgtacgaggtgcgaatcattcgaagtcatttttaacaccttattctctttatttgttaggagacgacggtagcgttgccaatgaacgcatatttggtaaaacttctctttcagaagaaatgtatattggtcataatatgacatccactttgacactgacatataataaaaaaataaaagggcattctgtttccggattattggtatatgaacaatttgaatcactaggatcaacgttgggagcttccagaaccaatttcccctttacatccattgaccagttatttgcaggaggagacgatgaagaacaatcaaattggggaaatccttctcaggatgctcgtaaaggttttataggtcgttttaactatgattataagggtaaatacttagcggagttttcttttcgttatgacggttcattaaaatttcatccggatcgtagatggggattttttccttcagtgtctttgggatggcggttatcggaagaagctttcatgaagaagttttctaatttggataatttgaaagtcagaggttcgtatggcattttaggtaatgacgctgtaggaggctggcaatggttgactaactattcgtttggtgacgcttacatttttaatcagactcctataaaatcgatagtcagtggtggtattccgaatgtagatttgacttgggaaaaaacagcgacattcaattttggggtggatgcatctatttataaaggattgctttctgtggaagcggatgtgttctataaacgtacgtacgatatcttaggttcaaggaacgcgtcaatgccgcaaacttttggtgcaactttgccttctgaaaactatggggttgtaaaagttaaggggtttgaactgcaagtaaaacatgataataaaataggagactttcggtatcatgtaggtggaaatgtcagttgggcgagaaataaggttgtagaaaaggattatgcggcaggagcagaaccatggaataatccgataggaaagacaatggggtatcgggcgtgttttgtggcactgggattatttcagagtgacgaagaagccgctgcatggcctcggttcaaaggaactcagccgacggctggtgatgtgaagtatgcggatttaaacaacgatgggattatagacgagcgcgataaaaaagttgtttctccctatagcaatacgcctgaaataatgtttggcttgaatctatcagcttcatggaaaggtttcgattttagtgctttgttccaaggtgctgccaataggaatgtgatgttaggtggttttgctacccaaatgtttattaacggagatgctaatttgcctaggtatttgtatgaagatcgttggactccggataatcgtgatgcacgttatcctaaagcatggggacccgatcatccttcaaataataaatcttctacattttggttgattaatggtaactatgtccgattaaagaatgtggaattaggatattccatatcaaaagatatattgtcgagagtgggagtagaccgtttgcgtatatatgttggaggaagcaatttattctctatagatcacatgccgggttatgatccggaaaaacaggatggaggaccgaattattatcctcagcaaaaggttttcaacatgggagtaaacataactttttaaatgagtatacaatgaaaaaatatatattttatttaatcgcatttttagctatttcttgcgaagatgttttggataaaaagaatttaggtgctattgatgattcgtatgtatggagtgatccgaatatgatagaattgaacgttaattcgttttatgccaattggatgccggctggtttgtttaagcaatctgcacttattcaaaatgggattatttcggatgaagctcgtagtggatataatggtcgtgcggtgaatattattaatggagtacgttttggggcggatcgtacagatgtgccttttcaaaattggtattatggcggcatacgcaaagccaatgagtttttgcagaatattgaagaacgttatattttgccggctaacgctactcaagcccagaaggagcaacgtgatcgttttatcggagaggtgagattttatcgtgctcatttgtattgggagatgataaaagtgtatggaggtgtgcccatcataactcaagtcatagataaagatgaaacagatgagagtttgttatatcctaaaagaaatactacagacgagagtttcacttttatcattaaagaattgaaagaggctgcggatttattaccggttacatacagtggagataattggggaagaataacaaaaggggctgcactcgcatattgcgcaagaatacaattgtatagggcaagtccgatgtttaatccgtctaatgaaaagaaatattgggaagatgcgtacgacacctataaagatgtgattggattagatgtctatgatttgcatccgacgttctcggacatttggaaagaaaaaggagaaaacaataaagaaattatatggtttaaagattataaaaagggaaccattactcacggttgggatgctggtaatatgatgcgttcgcaagcagtgggcgatgcgacagccaattgtccggtgcaggagttagtcgatgcgtttcctatgaaagatggcactccgtatgtaaagagtaatccggaaaccaatccgtatgattatcgtgatcctcgactaagagagactgtagtgtggaatggagatacatatggaccaagaaaagaaaaagtatacacatttgtttctgaatctaccgaccctaattctcctatgtataattttgatggaatcgattctcatcaatcggcgacaagtacaggatattatatgagaaaaatgaaagatgaatctttggacggtacgaaaggtgattatggatatggaaaaggaagctatacacaatgggtcgaactccgatatgccgaagtattattgggcttggctgaagctgcaaatgaaataggagaaacggaggaaggggtagaacaaataaaattgattcgcaagcgtgctggcatattgccgggagaaaataaacgttatggaatacctgaaaatatatctgtggatgatttcagaacgttagttcaaaatgaaagatatatagaattggcttttgaggacaaacgttattgggatttgcgacgttggaaattggcacatttgaagttgaataatcagttaacagcaatggaaatacgcaaaaaaataaacggtgaggagatttcatatacgtatacgcgtcgtgttcagcgtcacgataaaacaaacaagcctgtgtttttagaaaaattctattttcttcctttgcctaaagaagagttgcttaggaatccgaacttagaacaaaatgaagaatggaaataaaagaatatgattatgaaaaagatttatttatatatattagtgtgtgtgttagttggttattcatgtgatgacatgaatgattttgagcaaggaatattaaaagggtacgtgttggatgctgtaacaggagagggattggcggatgttgatgtggttctggaacctgttgttgcagcaaatggtagtgtgacttcaaaatctgacggtcattttaatttatcgcgtttagttgcgggtacatacagtgtgaatgttcgtaagaacggagcttccattatagataatgctcaggatgaaataacgataacggatggttgtgttcttaataaggaatataaactgactcccaggatttcagtttttgattttaatgttgattatgacaagaatgatcctacgaaatttgtggttcatttcaaggcacgaggaaatcaagggaataagtttaattattattctgtgatgtggaacgaatatccgaattttatatttgcggacttgcctaatactcaaagaaaggcagtaaaacatgcgacttcagaagaagcggaagttacatacgaagtgagtggattggatttaaaaagaggaacgacatattatatccgtgtaggagtaactcatatagccaatggcggagattacaatcatagtagaatgattccgatcaaatttgagtaagtaattatattttctcgataaatactagttgtaggagggaattgtccctcctgctttagaattatttgccgtaaaaatgcaaatattatatgagtaaacaactgcaacaaacatacctttagagttaaaatgaatcaaagatgagaaataacttttttctttccggattgtgtttattaaccgcttctcaaaatctggaagcaaaggataataaactggagaatgtgaatatactttttattcaagcagaccaacatcgttatgactgtacaggattttctcaaaggggactcgtgaaaactcctaatatagataaattggcttcagaaggagttgttttcaccaattcctattcatgtataccaacaagttgtcctgctcgtcaaagtttgatttccggtaaatggccggaacaacataagggactttggaattatgatataacgctgcctgtcactcctttcaatggtccgacgtggaccgagaaattatcagagaaagatattaagatgggatatgttggtaaatggcatgtcagcgatcggaaatcaccgaaggattttggatttgatgattatataccggagtggagttataataattggcgtaagaaaaataatctgccggattatgtatggcaagattcccggtgggtaatgggaggatatgatccggttgataaaatgcagtcccgtacacattggttggcacaacgtgtcatagaaatgataaagaaatatcagtccgaaggtaaaaagtggcatattcgttttgatacgagtgatccgcatttgccatgttatcctgttcgtgaatttctagaaatgtatgataagaataagatacaggaatggccaaactacaaagataatttgtcgaataagccttatatccaaagacaacagatctataattgggagttggaagattctgactggaagatgtggcaaggatatttgcagcgttattttggcaatataactcaactggatgatgctgtgggtatggttattgaggctttgaaagaaatgggagtgtatgataatacacttattgtatatacaactgaccatggagacgctgccggttcgcataatatggtggataagcactatgttatgtatgaagaggaagtgcatgtacctttggtaatgaaaattcccggagtaccacatcggatagtcgatcaatttgtcaataatcaattggatatggctgctacgttttgtgatatgtatcagttggattataaaacacaaggagaatccttatttcctttgattgagggaaaaaaggaatcgttaggagaatggcggaaatatgcgttcagtaattacaacggccaacaatttggtctgtttgtgcaacgtatgatacgtgacaagcgtatgaaatatgtatggaaccttacagatacggatgaattgtatgatttggaaagtgatccttgggaattgaataatctagtttattcgaaagaatataaagtggaacttgttcgtatgagaaaagctctttatgaggacttaaaacatagaagagatccgctgatttggcaagatgcggcaaaaaggcaactgattgataataaaaagttgtaatattgggagtataatcactattcgtaggattttagtcagtaacaattgtaatatttcagtaggtataaacaataataaaatgtatgatagaatgaaacgtccaaatataacgaaactctgtttgtctactttttgtgcactgccgttcttgagttttgcacagaaacgtccgcatattattctaatctttacggatcagcagaatgtaaatgctatgagtgcagcgggtaatccatttctatgtactccaaatatggatgctttggctaatgatggaattcgttttacgaatgtttattgtacctctcctgtttccggaccttcacgtgcaagtattgtgacagggctaatggctcgtgaagcaggagttgaatggaatgataattcaaaattgagagaaggtatacaaaccgttggtgacttgttgggtgagaatggctatcggactgtgtgggcagggaaatggcatattccagaaatctatccgcagcgctcaaaagacagcgttaaatatttgcatggttttgaattactccctttttgggacgcacctaacaaacattggctgttgggagcggaaacagatcctccattgacggacgcagtcgtttcgttcttggatagttatgataaaagagagaaacccttatttttggcggtcagttatcacaatcctcacgatatttgtatgtatccccgtaaagtcggttgggaaacaatgtcggattctttgttgaatctcagtcctttcggcaaatataaattaccggaaccgatggggatacaccctgattcgttgtcttatttaccgccattgccaggaaattttactataaatgtagatgagccggaatttgtcattgacaaacgcaccaagtctaactcttatggtgatgaggtccagttatcgtccctgttttctaaaagagaatggcaggcttatttaaattcatattatagattgacggaattggttgataaggaagtcgggaaggtggttgaagccttgaaacgtaatggaatgtatgaaaattctcttattatattcacttcagatcatggtgacggtatggctgcccatgaatgggcggcgaaacttagtttttatgaagagtctgttaaagtccctttgattatggtattgccggaaaagttacagcgaggagccgttaattctaatttagtatctttagccgaccttgttccgacattttgtgattatgccaaagtgagagcgaagacgaattttgcgggaatgagtttgcgccgggctatatttccaaccgaagaacggtggcgtgattttattgtggcggaattggcggatcatttgaaagacagaacaaggaaagggcgtatgattcgtaccgggcgttataaatatactatatattcatcaggtgaacgtaacgagcaattgtttgacttgatgacggatcctggtgaaacaataaatctggcttattcgaaggattatcggaagattcttgaaaagcaccgtaatttattgggtgaatggatgaaagaacgcaatgataattttaaaatagtgacttatgagaaataatatatgttttgtatatcttttattactgatcgttttgccagtttgttcaaagaatgtttcgcattttagcatttatgaaataatgtgtgagcaacaagttgaaccgttgggtatagaaaataagtctccgcgttttagttggaaggttgtatcacagcaacgtgcttatcgtcaatctgcttatcgtatattggtgacagatattgagggtgccttagcggctgacgaaggtactatctgggattcaggaaagtgtttttcttcaaattctgttcttattccttttcaaggtagggagcttcattctgcgactagatattattggaaagtcaaagtttggaatgaagcaggcgaagagtccgtatggagcaagcagggatcgtttgtgactgggatgatgaaggaacgtgactggggaaaagcccagtggattgctttagaaaaggatgatccggagaaaaatttatatccgggaatacatgctccgttggttgggaagatgattggtggacggaaagtagggggatataaattgcctatgttccgaaaagagctgcttataaacaaagaagtcaaagaagcaattgtgaatatttcgggattgggacattttgatttctatgtaaacggggagaaagtagggaaccattttttagacccaggatggacaaattatgcaaaaacggctctttatctgacttttgacgtgacaccgttattgaaaaaagagaatgtattgggagttatattgggaaacggcttttataatgtacctcgtgagcgctatttcaaacaattgatttcttttggggctcccaaagtaaaattggttttgtctttgaagtatacagatggttcttccgagttggttgttacgaaccggaactggaaagtatgtgaaagtccgataacttattcgagcatttatggaggagaggattatgatgctagaaaatatcagtcttcttggatgaaccccgggtttaatgatgatttgtggacagccccggttattacaaaaacagagatggaactgaaagttcaaacctctgctccgcttactgtacgtgatcagcttcctgttgtccggaaatatcagaattcgaaaggaaattggatctttgattttggacagaacttctcaggaatcgtccgtttgaaagtaagaggttatggcgggcataaagtaacgatgaagcccggagaacttctggagaaggatagtacggtcaatcaacgggcatcgggcgggccttatttttggagttacacattgagtggaaaaggtgtagaagaatggcatccgcagtttacttattatggattcaggtatgttgaagtatctggtgctgaaaagcttgagttgatagaattggcggggatgcatactacaaattcagctccggaagtaggacatttttcttgctctttgccgatgtttaataagatatatgaattgattgactggtcggtacgtagtaacttagcaagtattttgacagactgtcctcaccgggagaaacttggatggcttgaagtggctcaccttatgcagtatgctatgcagtacaggtatcagttgaatggtttgtacagtaaagtaatgggggatataaaagattctcagacaccggaaggtattgtgccctccattgctccggagtatgtacgatttgctgatggatttgagaattctccggaatgggggagtgcatttattattataccttggtatatttacaagtggtatggagataaaagtctgttatctgcttattatccatatatgaagagatatttggaatatttatcgactcgtgcggatgattatattgttgcttatggtttgggtgattggtttgatctgggacctaagcatccgggatattcgcagttgacatcgaatggggtgacgtcaactggtatgtattattacaatgcgacgataatgtctcaaatagcagaattacttggagaggaaaaggatgaagaacgctttacgcaattagctgcttgtatccgaaaagcctataatgaaaaattctacaataccgcgactaagcaatatgaccgcaatagtcagacggcaaacgcaatctctttatattttggcttggtggaagaatataatcgggaagttgtatttcagaacctggttgatgatattcagaaccgtaattatgccttgacatctggagatatcggctatcgttatctgttgagagtcttagaggaaaatggagattcagatattatttataaaatgaatacaaaatatgatgtacccggatatggatggcagctggcttatggtgccactgcgctgacggaatcctggcaggcatatggattcgtatcgaataatcattgtatgcttgggcatttgatggaatggttctttagtggtttgggaggtataagccaacaaacggaatcagtcggctttaagagggtaaaaataaagcctcaaatgccggtagggattaactcggtttctacatcctatgtgtcaccttacggtgatatttcttgccgttggatacgcaaatctgataaaatccggttgtatgtacaaatcccggccaattccgaagcgattgtttatttaccagcaaaaactgctgaagaaattacggaaagtggtatacctttgaagaatgttgatgaatgccggattcttgagagacctggtgagaactatatagtagtttccgttggttctggcaattatatttttgagatgtaaaatcaagtattaagataataataaatgaatatattaaaaaaaatggtatgtattttattgggcataattggaatacatacaattcaagctgaaataatcacttatccggctgaggttactcccggttcctggctatgtttcagaaaagatatatcagtagggaaagatgcgtcgcataatctactgaagattgctgctgattcaaaatattggttgtggataaatggtgaattaatcgttagagaaggaaatttgaaaagaggtcctaatccgaaagacacttactgtgatattcttcgggatgtaaaaggtttggtttccgggagaaacaccattgcacttttagtttggtatttcgggaaagatgggtttagccatagaaacagtccgacggcaggagtttctgtagatttgacgattggtaaacaacgatatataagtgatgatagttggaaggtgagcatacatccgtcattttatatcccgaacggtataaaccccaattatagattgccggaatcaaatatcggttttaatgcacaaaaagaagtggctttctgggataaggattttgatgatgcattatggcaggatgccaaggtaatcaaaaaggaactatcaggatggaatcaattggtagaacgtcctattcctatgtggaaagattatggattgaaagattatgtgaaagttgaaagaaaatctgatacgttgtttgtggcttatttaccttataatgcacaagtgaatccttatattaaactgaaagctaaagtcggagaaataattgatattcgaactgataattattgtgggggcggcactcccaatgtatatgctgaatatattactaaaaatggtattcaggaatttgaagcgtgggggtggatgaatggtcatcaggttttgtatacaattcctaaagatgtagaggtactggaattgaaattcagagagacggggtatgatacggagtttgttggatcattttcctgtgaagataagttttataataaattatgggataagtcgttacgcactttatatatcacgatgagagatacttatatggattgtccggatagggaacgtgctcaatggtggggggatgttgttaatgaattgggtgaggctttctattcgttggatcagaatgcgcatttgctcacacgtaaagctatccttgaacttatgaactggcaacgttcggatagtacgattttctcaccggttcctgccggtaactggaatcaggagttgccgatgcagatgcttgccagtatcggatattatggtttttggacatattatatggggactggagacaaaaatacgattaaagctgtctatcctaatgtgaagaaatatattcatgtatggaaacttgacgaagaaggactagttattcctcgtaaaggtggatggacctggggagattggggtgataataaagatcttgttttattgtataatctttggtattcattggcccttgaaggttttcatttgatggccgatttatttggtgaaaaagaagattcccgatgggcttgtcaggttaatgagaggttgaaacgggcttttcatacaaaattttggaacggtaacttttatatttcccctcattataaaggtaaaccagatgaccgttcacaagcattggctgtcattacgggcattttgcctgaaagtgcatatccggtaatacgtccttttttcaagcagcaatatcatgccagtccctacatggaaaagtatgttcttgaagctttgtgtatgatggggtattatgaggatgctttagagcgaatgaaaaaacgttattatgacatggtcgaaagtaaattgacaacattgtgggaaggttggggaatcggtaataaaggttatggcggtggttcatacaatcatgcttggagtggaggtcctttaacgattctttctcattattttgcgggtatctctcctatgaaaccggcatttaaggaatttgtcataaaccctgtgtgtaattgctttggggagattcattctataactcctactaaatgggggaaaatagaactttgtcttacaaataaattgaatgtgatagttgtagaagtgaagatacctcgaaaaacaaaagggcattttattattcctaacgggattgaaaagtaccggataaacggaaagggaaaaatagcaaaaaaaggtataatagtattgaaagaaggaatatggaaaattgaattctgttaattctagtgtagcgggttgtcgattaattatgttttgaagataataaatttattggtatacgatgaatatctgttgctgaacttaaaaatcccctaatcaacaaccatatttgtgtgactaagaatgctatgattgaattaaatataactggcaattttaagatagtatatgtgtttgtttattgtaatatttatcttgcttttatgaagaacttatttgttttcttatttttattttatgtatcctctaattattcggaagcgcaaactactgcccacaaatttgaagcaggcaagaacacattcttgttggatggaaaaccgtttgtggtgaaggctgccgagttgcattacactcgcatcccacaagcttattgggagcatcgcattgagatgtgcaaggcattaggcatgaatactatttgtatttatattttctggaatatccatgaacaggaagaaggaaagtttgatttttccggtcagaatgatattgcagctttctgtcgtgcggcacagaaacacggtatgtatgtcattgtccgccccggtccgtatgtgtgtgcggaatgggagatgggaggacttccctggtggctattgaagaaaaaagatatagccttgcgcacgcttgatccttattatatggaacgggtaggcatctttatgaaagaagtaggcaagcaactggctccgttgcaagtaaataaaggaggaaacattattatggtgcaggtagagaacgagtacggttcttatggaatcgacaaaccttatgtttctgctgtgcgcgacctggttcgtgaatccggttttaccgatgtacctctgtttcaatgtgactggagcagtaacttcactaataacgcgctcgatgacctgatttggaccgtgaactttggaacgggtgccaatatcgaccagcaatttaaaaaactcaaagaacttcgccccgaaactccattgatgtgtagcgagttctggagcggatggtttgaccactgggggcgcaaacatgagacacgtcctgcaaaagatatggtacagggcatcaaggatatgctcgaccggaacatctctttcagtctctatatgactcacggcggaacgactttcgggcattggggaggtgcaaacaatcctgcttattccgcaatgtgcagttcgtatgattatgatgctccgatcagtgaagccgggtggactaccgaaaagtttttcttgcttcgtgatttattgaaaaactatcttccggcaggtgaaacgttgcctgaagtccccgcagctttgcctgttattgaaattcccgaattccatttcactaaagtggctccgctattttcgaatctgccggaagccaaacaaacagtggatattcaaccgatggaacaattcaatcagggatggggggctattctgtatcggaccacattgcctgaagttactgcggcaggaaccactttgaagattacggaagtgcacgactgggcgcaggtctatgccgacggcaaacttctggcacgtttggaccgtcgtaagggagaatttacaacgactctgcctgtcctgaaaaaaggtacgcaactggatattctagtggaagcaatgggacgtgtcaactttgacaaatccatccacgatcgcaaaggaatcacagaaaaggtggaattaatttcgggtaatcagtctaaggaattgaaaaactggacagtgtacaacttcccggtagattattcttttattaaagacaagaaatataacgatacaaaaatagtaccgactatgcctgcttactataagagtacctttaacctggataaagtaggagatacattcctggatatgagtacatggggtaaaggtatggtttgggtgaacgggcatgcaatgggacgtttttgggaaattggtccgcaacagaccctttttatgccggggtgttggctcaaagaaggagagaatgaaattctcgtattggatttgaaaggtcctgtcaaagcttctatcaaaggtttgaagaaacctattcttgatgtacttcgtgaaaaagctcccgaaacacaccgcaaggatggagaaaaactgaaactgacgagtgagaaagtgggccatgaaggagctttcactccgggtaacggctggcaggaagtgcggtttgccactccggtgaaaggacgttatttctgtctggaagcactttctccacaagcaaatgataacatcgcagcgatagcagagtttgatgtcctgggagctgatggtaaaccggtatcccgcgaacattggaagattcgttatgccgatagtgaagaaacgcgtagtggcaaccgtacagctgacaagatattcgacttgcaggaatctactttctggatgaccgtggacaatgttccttatcctcatcagttggtgattgatttgagtaaagtagaaacagtaactggcttccgctatctgcctcgtgccgaaaaagagtatccgggtatgattagagaatatagaatatttattaaaaaagaggattttgactatgggaaagttgttttatagcaacagagaatcggaagtgatgcatatctttgagcagaaactggcggagtaggaagggaaacctgttgagcaacctaatttctacgggatggagaaaacataggcagaaaagagtaagatacaggtattgaaaaactaaacaaaagaccaatgatatagctgggtatgaaacattacccggctatatttgtcttagaaccctttcataaagaatttctaatttcattgctaataggaaaattcttatatttgctgcaactaatacttaaacaccatagttgcaaatggaatttacagaagagcaaatactgttgagagctttgtcacgaggagatgagaaagcttttgaggttttgtttatgcgttatttcccgagagtaaaacgttttatatccggtttgcttcaggatgatataacggcagaggattttgcacaagatattctcctcaaactatggcagaagcgtgaggagatggcaaaaatcgaaaatctgaatgcctacctttatcggacttcccggaatgctgtgtaccagcatttacgacatatacttttggtgaatgaatatggagaaaagcaacaggagaatctttcccgtcagcagaatgagggtgcgggaaacatcgaagaaaatatgtttgctgaagaattactgttgttgatacagcatacggtagagcaaatgcccgcccaacgaaaaagaatttatgagatgagccgtaaagaaggcaaaaacaatgatgagatagcgcaactgcttgcaataaacaaacggactgtagaaaaccatctcacacaagcattggctgatatccgcaagatgctgaagcacttttatcttttctaaataaaaccacttcctattgacaaaaactcttcttttattctcctttctcaaaaaaagtagaaaaaatagcttttagactgtgtgtgtattctatctcgtgcatcttattaataaacggataaaatcatgaagaagaaaagcatatcagaactaatacatttttttgttcgccatcccctgcaaaactccttgcagatgaagttttggcgttggctggtttctcctgctgatgcagaagataaagaagaagctatacaggaagagtggatgaatatcatcgctgaacctgatgaggctacccggcgttcatggtatgaggtccggcgtaaagcgggacttgcaaatccgataataaaaccgcattgggaaatcaaaccacttcttcgcattgcttctatgatattaatccccttattttcagtgctattatcgtggtattatataaatgattatactgattcttgcaaattggtagaatatattgttcccatgggtgaacggggagaattgactttgccggatgggacaaaggtacagatcaattcggagagcagtatcatttacccgaaaagctttcgaggcgatacacgtactgtttatctttccggagaggcgaattttgatgtccataaggataagaaacatccgtttattgtcaagacatctttgttatcagttcgtgctttaggtacgaagtttaatatacaggcatattcggaagacaggaaaacgattacaactcttgaaaatggaaaagtgcaaatcaataacctgctggcaccagacagctgttttattcttactcccggtgaacaacttgaatacaatcacctgactaagaattatgaaaaacgaaaaatagatgtgatgatggcttccggttggacacgtggtgaattgaattttgtcgattgccatctggaggatattctgaacacattgggacgacattataatgtagaaataaaggcagaaccgcatttatacacaaatgatttatataccattaagcttagaaagggcgaacctcttcaagcagcaattcatattgtaacaatgaccgtcggaggtatggaaagcaaggtcacagacaataaggttgtgatactgacagctgcttcaccggcgaataagagtaagaaaggaggtacccatccgtaaaaaggttggacaaaactgatccttttgtccaacccgaaataaataccgttatcatttaaaattttaggaaatagtgaaccttaaatgtagtattcatttaatatacaaaagtatgaattttaattcttattttactataaaacataccagtaatttgcgtattttattgttaaccttattctttatagtccctttgggtactatctatgggcagaatcagttgattactattgccggaaaaaacataactttgttgaaagcttttgatgctattgaaagtcagactcaattaagcattacttatagtcggactaaaatagatgtgaatcggacattgagtgttgattttaagaaacaaaaactctctattgttttggataagttgctcgcgggaacggggtttacttacaagatagaaaaagggtatatcgttctggttcccgtaccggtaaaacaagagcaaacggaagcaacttcgaaaaagatacaaggagtgattgtagatacgaatggagatccggtgattggtgccagtattcaggagaaaggagtggccgggaaaggtacagtgtctgatttggatggaaaatttaacctgtcagttgcgtcaaatgctgtattactgatttcatatatcggttttcagtctcttgaagtaaaggtgggaaatcggacaagcttgtctttggtattaaaagaagatcatcagttgctggatgaagtagtcgttatcggttatggaacaatggagaaacgtgctgtgaccagctccattacttccatatcttcaaaagatttagtgactggattgggaggctctaccattgcgactgctctgaaaggaaaaatctccggtatgaatgtttctgaaacttccagtccgaatgcctctgctagtttccagcttcgtggggtagcttccatcaatgcttcttcttcccctttgattgtgatagacggaattcctggtggtgatttgcgttctatcagtcaggaagatattcaatccattgatgttttgaaggatgcctctgcaggtgctatttacggaacaagggcagctggtggtgtcattctcgtgactaccaagaaagcgaaagaaggtcctatcacattatcatatacaggcgagctgtccaccgaacaagtttccagaagaccacaggtcctggatcgcgatgctttcgtgaggttcggtgtaggaacagatttgggagcgtctaccgattggtacggtgaacttttaaatgagggagcactttcccagcgccatgttgtcaccctttcgggagggggacatacagccagaatatatgccactattatggcacaggatcagaaaggtattgcgataggcgataatcgtaaagactattcggggcgtatcaatgcaaactttaatcttctcaatgacttgctggaaataggcttacatacagaatatcgtgaagcacatcgggatcagcggagcagtagttcctgtttcgacatggcattgaagatgaatccaacggaacatgtttatgatagtactagtgaaacaggctataatgtattggttggtggtagtgaatattacaatccattagcggaagttatgctcaagcagacggataatgttgataaatggctcaaggcggatgctacggtaaagctcaatctgcctgccggattttcggcacaagccactctcggctgggaagaccgccagtatcaacagacgcattatgtatccgcattacacagaacgtctttgaatggaagttataaaggaaagggatttcacggatatagtaaaacagtcaatgtttcttttgaacctaccattaatttcatgcgtgtttttgcagatgaccatacagtcagtgcggtggccggatatagctattgggaaaacaattctgaaaattttgatatgtctaactacgatttccctgtggatggagtaggagcttgggatatgggaacaggtagctggctttctgacggaaaggcggctatgtcgtcccacaaatatcctcgtgaacgtcttatctccttctttggtcgggcgaattatagctataaagatcgttatatggttactggaagtgtccgtcatgagggatcttccaaatttggaaagaatcatcgctggggaacattctgggctgtatcaggtggatggcgtatatccaatgaagcctttctgcgtgatgtcagttttcttgatgacctcaaagtacgtgtcggttatggtgtgacgggaaataacaatttctctgcaggagcatccacggccatgtactcctccaattcaatgtggccttataacggtacatggattacttcttatggaccggctcgtaatgtcaataatgacttgcattgggaaaagaaagcagagcttaacatcggtttggattatgcgtttctgaataaccggctttttggaaagttcgatatatataaaagaagagtttccggaatgttatacaatatcagtgtacccaatcctcccgccgtttacgagaaaacgaccatgaattatggtaatcttgagaataccggatgggagtttgagattggcggagtgcctgttaaaacgaaagactttaactggacaactaccatgcgtctatcccattcttcttccaaaattacctctttgtgggggaataatacttaccaggatcgtgtaggattcccgtcaccgggaacgaacggatcagccggaagaattgaagcaggaacaaagatcggaagctattatatctggaaatatgccggtatcacggataatggaagatggcttctgtatgataagaacgacaatgtgattcttagcgataagaagacctatgatgacaagcggtacatcggtaatgctattcctgcattgatggtatcatgggatcataccttcacttacaagaacctctctttaggtatcaacctgcgtagctggatcgatttcgacgtgtttaataccataaatatgtactatggactttctgaagtagcaggccagaacgttcttcgcaatgcgtacattgacaaccggcacatcaaagaagtaaagcagctttgcgattactggcttgaggacggcactttcttaaagatagacgccattagtctgggatattctcttaacatgaaaaagtggcagaaatatatagataagattgatctttacctgaccgtccggaatgtggcatgtttcacgaaatattcaggacttaatccggaagtgaatgtcaacggactggaccctggttatgaatggtttaataatatttatcctgaaactcgtagatataccgttggtatgaaaatccaattctaatattaaagtacctataaactaataaaatgatatgagacgaaatattttaatcattatctccttcctcacccttctggtgtcatccggttgtacaaatctggatgagaagtggtattccgaagtcactccggacacttatttcacgtctaaggaaactgtttattctttcttggtacgctctttcacacattggcgttggtttcacggattcgaccgtgccattcttcaagaatgtacaacagatgagatgtgtgtcacacaaaaaggaatacattacaatgatgtcagatattcccaactgcagcatcacgactggacacctcttcaccccaacaacgaagaaacctggcgtggggtaggcatgggagtggcaatggctttagcttgtaaggaagacttatccggtgtggattatgtatcactgggcatgacggaagaattgaaagcagatcatcagatgcaacttcagacattggttgcctatttttatctgcggggacttgatttctatgggggtatgcctatttaccggcgctctactaccgaggaagttccacgttccactgcacgcgaaacctttaattatgtggaagaactgttgcttgccgctattcccaaattagagaaaaaaagagcagatatgctggaagaaggctatttacgtcaaggaactgccgccgcccttcttgctcagttatattttaatgcggaagtctacatgggagagaaccgttttgctgaatgtgcgcaggtctgccaggatctattagatggcaaatacggttattacgaattggaggaagactggttcggtcctttcactttcgacaataataaatctaaggaagtaatgtggtctgttcagtcgcaatatgcaaaaggcactttgtttcaatggcagttcgaacgctataatcattataatgcaaagaactattttgatctaagcggctattcttctactaatggtatgcatcttcagccgtctcttaaacccaatggcgatccctatacggataagcttgggcgaccttttgccaagttcaacaataaagatcttcgtaaaaaattgtacttgtataaagggaatgggaaatacgaaggaatgttcctttatggaaaattacagcgtacatcaagaagtggcacagaggtgaagtgtacgggactgtacgaatatccgggtgaggttcttgaatttgtcgatcaggtggcacaattcaagaaagtgaaagacggagaatattcttcagtgaatgagcttccctccaatataagtaccggggaagagaattccggaatacgtttgtgcaaactaccggttcccgacaatatcgacaaaaccattgcttttaatccggattatccggttattcgttttgctgaaatctattatatgcttgctgaatgtaaatatagaagcggctataaaaaagaagcagccaatcttttcaatgaagtgcgtaaacgcaatttcgagaataaagccgatcctgatccggtgaccgaaacgaatatcgacaagttccggattcttgatgagtggatggtcgagtttctgggtgaacagcgtcgtcgtaccgatcttcgtcgttgggggttgtatacaacaggttcttggtgggatcataaacctactaacgacgatcattatgagctttttcctattccggaaaagtcaatttctgtcagcaatgtcttgaagcaaaatccgggatacggaggcggcaatgaaatgactaaagaagaagccggtatctatagtgtgaagcaaatcgattaatcaactattaaagaataatataatgaatagcaagatattttttttaggagccatcatgttgctgcctacattcgcaagttgccaacaagaaaagccttttcctgatgatgcagtagataaagtgtatgaataccttccggagtggcaggcaggttatttggatattcatcagattagtaccggaagaggtaatgcagcctatcttatttttccggatgggactaccatgttattggatgcaggagatttaggagtacattcaggcacacaggaaattatgaaagcagtgcctaatgattctaagcggcctgccgaatggattgctcaatatataaaacatttctcattgccattaaaaaataacggagcacttgattatgccttgctcactcactttgatacggaccatatcggacagaatggaaaactggcaatcgaaaaagtaggactggattacaaacttaccggaatcactcatgttggtaatcttctcaatatttccactttgatagatcgtggttatcctacttatgattatccgacagcagctaaagtctctggtgctcatatctcaaactataaattatatgttgccgctcgtgacagggaaggtaaaaagaatgagggatttgtaataggaagcaatagtcagatcaaactcttgaaagatccgggctcttatcctacattcgaagtacgtaatatcgtgggtaatggtaaaatttggacaggtagcggaacaacagccaaagagcttgtgccttctacagcctcttcaagtgaacagttgaacgaaaaccgttgcagttgtggaatccgtatcacatacggtaatttcgattatttttcggcaggagatattctgggcgtagaaaaagcaccggaatggtttgatatagaaacgccggtagccaaattgctcggtgagacggatgtggttgttgctaatcatcacgcttattctgatgctatgtgcgatacctacatttcccaagtgaaaccacaagtctatgtaattcccgtatgggattactatcaccctcaaccggcaacgttgagccggatgctgtctcaaactctttatcctggtgaacggtcggtttttgctgccggtatggtagacagtaacaggagcagactgggtgaagacggcttgaagataaagcctgccggacatgttgttacgcgtgtttatccgggtggagagaagtttcagatctttgtattaaatgatcggaatgaagcttatgagatactatataaaacaggtgagattaaatctaataattgatgaacatgaaaattaaagagtcaatagcctggacagcttttctggctgtgatggcaatcataatgtttccgtcatgctctgacgaacatgaagccggtatattggaaataacaaataatgagattattcttcaggcggaaggtgatccggttcaggtggaggtgaagtccaataccgagtggcgaattgattttgtagaatcaacctggttctctacggatatacgtggagcccagtcatcaagaacttatttcactgtgacttatgatgagaatatcagtgattccgaacgtttctgtgatattcgtgtgtttacgaaagatggtaagactgcggatgtaatcaagataaaacaattatcccgttatccatttattgttcctgccagtgataagatggagctgtttactaaaggaggtgaatatgaaatggaaatctctaccaatgtgcccgaaacggatatcgttattacgccaacggtgaactgggtgcaggagtataggataagtgatggaaagctttattttaatacggaaacaaattcgcaatcaccccgtacaggaagtattgtgttgagttatgacgatcagtaccagcgtaaggtcacggctaccattaatctctcgcaagcatattctgaatatgcgaatgcggaacttgtcagttatccaaccgtacatggttatgctgtcggtggaattactaacaatgtatatgttgaaggaaccatcgtagccaatggcacttcgaagaacttcccgagcaatcgctatgtcattcagaatgaggcaggagagacagttgtgtttgagtccgaatctttaattacgtttgcacaatttgccaaagtgtcattgtgtctgaaagatggaatgataagagaagaatcagagggtagctttacttatagactgattagcggtatcactgctgcccacgtaatcagctcggaactttctaccttcacaattcctgaaagaacgattgctgaacttacggataatatggtatttagtcttgtgaccctgaaagatgtcgagattgcatctccggtaggtgcattcactaatttcaagactactgacccgggagctgccgatcgtaagattaataaaaactattgggtagaaaagttccctgcatattacagatactatccgacctgtataagagataaaaacggttctaatacatatatgcttactgcgtttgaagctccttatgctcacgaaacacttcctaaaggttcgggaagcataacaggaatggtggcgaaagtgaaacttacaaatttcgacatctctgaaagccggttatgtattcttccgcttaacagagaagatattaacatcagtgatataaacgagatcacttctgtgcttgtagaatgggattgtaatgtacccgattggaaagaaataggctcttctacttttacggattaccatcctacgggtggcgaggcatcgcaggcgaatgctcttcttagcaaagacggaaataaatatttccagcaaacctatgcagactacattctgggattccaggatgatttcagaggagatgttaaccttaacacgaccgatggatactatggtcgtatgcgaggcggtgcttttaatagtaaaccgtggtctacaagttcatatttctacgtagacaaaatatcgacagtaggtatttctacatccttgtctcttcaggttgaaatgaatgcaagttggggaggtggccctgttgcagtggttgaatatgcttattcgatgaatggtgaatggattaaagtagataattcagagtttaccattctgggacagtttgatagaacggctgcaggtggacagacggagaagaacattcctggttataaagtctatgactttaagttgccggatgccttattgaaccgtgataatatttgcatcagattgcgaccggtcagactcccggcaggggtatccagcttcatgccgcttagacttgctaatatctcaatcaaatacaacaaataatcaatagggaatatatataaaataatcggaagcaataaaggacatatcctgattgcttccgattatctttttatatgtggatcttgaacgatctctattcaaaaagaacgatatcttatttctccaacaattcttctttatttttccaacaaatcctttaagaagtcgtccaactccttatccaaccctttcagcaattcatcattcaccagtatggtatcgtcgtcaatcaacagcaattctgctacggtttctttctcttcatctaccaaaacgaaagaataaggtttcagaatagtcactttgtcgaaatctccggcatccttcattctgcaaagaatgttgcgaagagaaggttccacgttttcaaggaaatcatccccttcataagtagcccattcttcgatcatgatgtttgccagttcttcatcatcatcgttgtaaatattaagttgtcccgatgcctgatccggttggagatggatatcggttacaactgtttgttcacagctacatacatatttagcgactgccttttggatagccgattcgataatagataatgattgttggctcaatttcatgggttccttctttttataagttcaaaggtataaaaaaaataagatttgatacacaatttccttaaaaatcatcattaaatcggctcatttgcaattttaacttgggtaattgagcatttctctcctttagttcagctaaatacaaagtagtaagataataattcggcacatcatcaatggtagcttgagggctatctgtgatgttctttttatctatttttttagctagttgttgggccttttctgcccattcttctgctttagccaaactatctttcatttcgtagtaaacagcaatgttgagagctgcccgcatttttttcttttggttcttggtaccttcgaaagcctgacgccaaagttcgtatgcgtcgtcccatgaattttcgcgtacataaatggcagcgtcacgcataggaaccgaaccaccagtataaagataccgtgttccttttttccaaatagggacaatatttttcaccggaaccgttcctgcgaatgctgccgcttcttccagcatctgcttgtcgggaatcatgcgagtggcggcttctatggctgtacctccaaactcctcccaaaaaatgctatcattaggatggagtgtagtcatcggtctgctacgttcgggaagataaactttcaccgtgggataaactttcacgtctaccgctccttgaaagcagttgaactcatccagatagcggacagtctttgttgctttgagttgcaggttttccagcgcaataataaagtccactcccaagttagaagccagttgacgcacttcctcctggctcaatgtactttcgcgggccagtttatcattggcgcgtaaggcagaatcacagataaccacctcatcgaagtagttctgctgtgctatttcttctgccagtgattcagtggctgtcttaggatctccattggcataagctgttgcacgacttatcaatggtgtaccttctttaattttttcagtctctgttatcagtttattatccggggcgtcgctggtgttattcacaatagctactttccggagttgcggaggaaagctcaagtcggcaggttgcagataatcaatggggatctgttccagactctgacagctacccagagtcagcaggaataaaacgatgaaaaccagtgaataagattttgccatagttttgttctatttagtaatttgaacaaaagtacaactttggaagaataaaagaaagtctcaaacagtttttaaccgtttgagactttcttttataagttgaatatagagagactatgccataaagcacattaccctacaatttccaacctttaatttttaattattaattaatcaaaggttctttccgtggcagtttttatactttttcccgcttccgcatggacaaggatcgttacgacctactgtcttctctgcacgaatcggttcacgtttctgctgttcacgagtatcctgacttgcagcagcctgctggttcggatcactcaaattttctttgttttcgcgatacttgctcatatcctggcgttgttcaggagcagcctgacgcacttctacacggcgtgcagctgattcatccggagcttcctgtacaggaatttgtccacgcatcaaaatagatatagtctggttattgatcttgttcaccatagcgtcaaacaaagtcacagattccagtttataaatcaatagcgggtctttctgctcgtagcttgcattctgtacggaatgtttcagttcgtccagttcgcgcaagttttctttccatgcttcgtcgattacgtggagcaagattgatttctcgaacgacttcaccacttctttagattccgattcgtaagccgctttcaggttacaagagatattatacattcgtttaccgtctgtaataggaatcaggatgttttcgtacatgtgtccctggttttcatatacctgtttgataaccgggttagcgatctgtgccagacgttcagttttgcgtttgaagttatccatcgcaatgttgaaagtcttttcggccaacttttcttttttctcgttacggaattcttcttcagtgaacggagtttccatcgccaatgtctgaagcagttccatttggcaaccttcataatcattgttttcgatagcattggcacaacggtcccaaatcatgttcacgatgtccataccgatacgttcacccatcaaagcgtggcggcgtttggtgtaaaccactgtacgctgcttgttcatcacgtcgtcatattccaacagacgtttacgaataccgaagttattttcttccaccttcttctgggcacgttcgatagaattggaaatcatcttgtgttcgatcatttcgccttcctggaaaccaagtttgtccattacgctggcgatacggtcggaggagaacagacgcatcaaatcatcttccagtgacacaaagaatacagaagaacccgggtcaccctgacgtcctgcacgaccacgcaactggcggtctacacgacgggattcgtgacgttccgtaccgataattgccaaaccgcccgcagctttcacttccggacttaacttgatgtcggtaccacgaccagccatattggtagcaatggttactgttccgcttaaaccggcggtagcaacgatgtccgcttctttctggtgcagtttggcgttcaataccttgtgctcaatcttacgcatggtaagcatcttgctcaacatttcggagatttctaccgaagtagtacccaccaataccggacgtcctgcttgaaccaatttttcgatttcctcgataacagctttatacttttcgcgtttcgtcttgtaaacgcggtcgttcatatcctttcttgcaatcggacggttggtcgggatcacgactacgtccaatttgtagatatcccaaagttcgcctgcttccgtttcagcagtaccggtcataccggacagtttgtgatacatacggaagtagttctgcaaagtaatggtagcgaaggtctgtgtagcagcttccactttcacacgttccttagcttcgatagcctggtgcaatccgtcagagtaacgacgaccttccataatacgaccggtctgttcgtctacaatcttcacctgaccgtcgattactacgtattcatcgtctttttcgaacatcgtgtaagccttcaacagctgattgatggtgtgtacacgttccgatttgatggcatagttagtcaataactcatccttcttttcaagcagttgctcgttggtcagattcaggttttccaattctgaaagttgtccggcgatatccggaagcacgaacaatgtcgggtcttcagagttaccggtaatcaggtctacacccttatcagtcaggtctacgctatttagtttttcgtcaattacgaagtacagcggatcagtcacttcatgcatacgcttgttgttctgttccatgtagatctcttccgtcttgagcatacctgccttgatcccctgttcactaaggaacttaatcaacggtttgtttttcggcaatgctttatgactgcggtatagagcgaggaatccttcttccacctctttcttatcgttggatgcgatcagtttttttgcttcggaaagatatttggtagccagtaccttttgtgcttctaccagacgttccactagcggacggagttgctcgaacaactggtcatcgcctttaggtacaggaccggagataatcaacggagtacgtgcgtcgtcaatcaataccgagtcgacctcatcgacgatggcataattgtgctgacgttgtacaaggtctttcgggctgatagccatgttgtcacgcagatagtcgaaaccgaattcgttgtttgtaccgaaagtaatatccgccagatacgcctgacgacgtgcgtcggagttcggctgatgacggtcgatacaatctacgcttaaaccgtggaacatgtaaagaggacccatccattcggagtcacgtttggcgaggtaatcattcacggtaactacgtgtacgccgtttccggtcaatgcgttgaggaataccgggagtgtagccaccaatgttttaccttcaccggttgccatttccgcaatcttacctttatgcagaacgacaccaccaaagagctgtacatcgtagtgaaccatgttccacaatgtatcgttaccaccggctacccagtgattctgatagatggccttgtcgccttcgatgcgtacgaaatcttttgtagcagctagttgacggtcgaagtcggtagccgttacaacgatttcttcattttctgtaaaacgtttggcagtagcctttacgatagaaaaagcaacaggcagtacttcgtccagtgctttttcatatttttccagaatttctttttctgtcttatcgatttgtgcgaagacttcttcgcggtcttccagttcgagagtttcaatgcttgccttcaactcttccaccttcgcacgttcagcagtagccgattcatggatatattttttgagttcttccgttttggcacggagggcgtcgttgtctagtttttcaatctccgggtaagcagctttgatcttttccacccagggcttgatttctttcatgtctcgtgtggatttgtttccgaaaaccgagcttaaaaattcattaaatcccatgttatattatttagtttattatttatttcaatttcaacgcggattaacgccgatttacgcagattaaaggaaagattaaattggattttttttaatccgcgtaaatctgcgttaatctgcgttggggaatctttatatcaagaaacctccgcaaagttacattaaaatgctgatttatttatgttttgctccctgtttttgtgagtaaatttttaccgcaggtcggtaataggagcagaagtacaggcgttgggagcccggatgcgcataaaatgtgccagtgtaggcgcaatatggtcgatggttacaggtgtctggataatggccggtttcacggaatgtcccatgaaaatcagcggtgagggaatataggaatgacgtaccaccttgttgtcgccgccgttttcgttgacgatagtccatccggggaggacatcgattacgaggtcacccgaacgtttgcggtggtagccgttacgtattttgtagatttccggagtccatgaacccagcaatagccggttagccgaataggcttcgttcactccgctgaactgcatcaggaattctgctgacttttgttggatctctgccagattcagttctttcttttccaataacttatgattcagataaatctgctggttatggtgagcttccacatactttccttcgccatacgtagccatcaggtacatattcaatagagccgcacaacggttgaggtaaaactctccgccgggcactttgtacaatcccgaatcaggcgattcgctgtctatatatccggtggaagtgacgaaaataagtacattttgcagtcctactttcttatcaagaacttcgagcaggtcggcaatgctgcggtcaagacgcacgtaggtgtcttgtatttccatagcacattcctgtacggatttgtgcgcatagtttccagcataataagtgagtgccaataagtcagtaatgtcatccatgccgatggagcttttgttcaatgcttcttcggcaagcgcattcacttcatcattcacaaaagggctggcgatgaagcggcggtatttattactgcggtcatcatcgaatttatatttgaagagcatatcccgccaatctggcaggaaagtgtacatgccccggggaaatatgggttcccatgtcataccggcaatacggaaatcgatcgcttgacggtcgttatattggcttgcccaccacggaaactctccataataggtggttccactccattttccggtgttgggattgagccaaaaagcagcgtttccggcatgtccggctgcaaaaagtgcggcatcgcaatcaggtgcaatggcatatacgagtcctttgccttgtgtcgctattttcagctcgtcggcaatggttgaagtcagaagtttggtgggggcgacagtctggtcggtgtaataccccataaatgccgtgtcgtctgtgctgttgacggggcgaagggtagaggcatccatccagcgttgagaaataattccgttcatggaaggcgtcgtaccgctataaatagccgctatggcagaagcgcggtctataccgcagaaggtatattcggcattatggaacactcttccctctttccaaagacgtttgaagcctttctcaccgtagagtgacgaaaaagcttccagatagtccgtacgtaattggtcaatcgtcagccctaccactaatttaggggcggcaggtagtgactgggcttgtagcccggtgaaagtcagtacggtgatgagggaagttagtagtcctttcattatttctttttagatgtcacaatcagattgctcgctgaacgtatcagcaaaacgagtgccaaaggtacaacagcaaagtcaaatctttgcggaattaccggaaaaagcactataaaaagtgttaaaaccgccagattcagggttaaataccaacatttcttcccttttcggacacaatatataatgtatggcaagaaaagaagttgccccggatggaataccagtaataggaaattagagttgactgccgggtgttgggagaagagtgcgagaaatgcaaggacgcatcccacaatacctgctataccaaaaaggaagaggtcgattccccataatccggttctccggcggattccatagattgtggcggcggttgtcaatataaataagagtaaggtgcattgaagcggagtaggcatccagccgctttcatccggttcgggagtggcatcgactaccagctcgttggccgttatgagtggacgctggatagaatcgcttttaatttgtgcaccgtcgaaagcatccatcaggtagaaaggggcaaacatcatctgacgttgtgtgatgggctggtcggcttcacttccgatacagagatcaatgccgaaacgtgcccacggatgtcctttgcaatactgatgtacaatgtcgcggaaagtgagggagccatcctgtggttctgcgggataaatcacttttcctgcaatgctttcttctatcttgtcccgggggcgggtagcacaattgtcgtaaaagaaattataacggtatacccggttttccggacgatagttttcttgtaataaccggatcagttcagtcttttcttcatcggtcagattgagcgtttgctgccatacgctgcgtccgaaaaatgcgtattcagctgcaaaacgttcataatccgttgctcccagttggtagtctgtttctccgagcgagaagcggaagatgaagttgggagtgttgaaactgaacagtccgtagttgaatacaacgtcaatcccttgtgaaggattttcgtaacggatggcagtgtgtccgaatagggaatatatttcctctccgggggcacaagtcaacagactcaaacggatggagtcgttgttgttggcagatgcttgtccggtgggcagaagcaacaggaagaaggagaggatgatgtatgagaaaaaccgtttcattagctggttcgttttatttcggtggcaaatatagaaagaatagttggattcgggaaaacggagcctctattttatcagaataaaggctctatatggcttaaacagaggcgctgttttctttaaatggagcctctgtttgggtgaaataatgtttctgcttgaacggaaaatcggttacaaaatagtggaacactttttggaacgctgtttttttcttgtaatctgttgcttattagttgtttatgatgtaataaaaaaagactgccgaacgcaaagtggaatacataataaacaataaaagataattgatctatttaaaaatagatagttcgatttttttgtttttggggatttctaaaatgaaaaaagaagataattcctcttctatgcttcaacttttctttttttactttacctttgcgcccgctaaagaaccaaaagatttgaatttaataatcgacataggaaatacaaaggcaaagattgctttcttcgacggcggagaaatggtggatgtagtagctgaatccaatcagtcgctgggttgcttgaaagctctttgttctcaatatccggttgaacaggggattgtggctactgtcattgatctaaacgaaaaggttttagctgatttggccgctttgccgtttcctttgctctggctcaatcatcagactccgcttccggttgtcaacctgtacgaaactcccgaaacattgggatatgatcgtatggctgccgtagtgggtgctaatgagcagtttcctcatcgggatatattggtgattgatgcgggaacttgcattacttatgagtttattgactcaaaaggtcagtatcatggcggtaatatttctcccggtatgcagatgcgtttcaaagcacttcatcagtttacaggacgtttgcctctggtagacaccaacgggcgcaaactcccgatgggacgggacaccgaaacggctatacgtgccggagtgatgaaagggatggaatacgaaatttcaggttatattgagtctatgaagcataaatatcctgaacttttggtttttttaacgggtggagatgatttttcttttgatagcagcgtaaaaagtatcatctttgcagatagatttttagtgttgaaaggattaaatagaattttaaactataataatggtaggatttaaacacacactttgtgcgcttttgctcacgatggttaccggaacggcaatcgctcaaaataatacaaactctccttatacacgatatggctatggcgacttgtccgatcagagtttcggtaacagcagggcgatggggggaattgcttttggacttcgggatggagcacagatcaatccgctgaatcctgcttcgtatacagccattgactcattgacattcctctttgaaggaggtgtcagtctgcaaaatatgaatattagcggtagcggtgtgaaactgaacgctaaaaactccagttttgactatctggctatgcaatttcgtttgcatccgaggatagcgatgagtatcggattattgccgttctccaatgtgggatattcagtgtcggatacacaggctgcaacagatcctactaccggtaatacggctgattatgccagaagctataccggagatggaggtttgcatcaattatatgccggagtgggagtgaaagtgctcaaaaacctttcggtaggtgtgaatgcttcttatttctggggagatattaatcggacacgtgtcctttatttcccaagtgtatcaggtgcttataattataatcaccagtcggttgcgtcagtgtcgagctataaacttgattttggagcacaatatacattcgatattaataaaaaacattcagtgacaattggagctatatattctccgaagttgaaactgggtaatgactatagtgtaacgacacaaatggtttcaaattctacgggtacagcggtttctactacaacattgaaaccggatgcaacgtttgaagttcctaatacatttggcgccggatttacatataactatgacaaacgcctgactgttggtctggattatagtttgcaacaatggtcaaaaacgaaatttgacgtaaatacatcagatgaagctgtacgtgaggattttaatgaaacatatacgtattgcgatcgtcataaaatatcagtgggtgcggaatacattcctaatttgatgggacgttcctatttatcccatattaaataccgtctgggagcttattatacgactccgtattataagatcggcggcaaagaggctacccgtgaatatggcgtaactgccggtttcggtctgcctgtgcctcgttcccgttccattcttagcatcagcggacaatttgtccgtatcagtggacaggaatcggcttttgtaaatgaaaacatcttccgcgtgagcatcggattgacgttcaacgaacgttggttcttcaaacgcagagtggagtaatgagatgaatgtaagaaagaatagacgactatataataacaactaaaatttagatacaatgaaaattaaaacgcttgtggctatgttgttcctttcggcaggagcaaccactgtggtagcacaggatgcgtctaactgtaactcgaacagtagtatctcgcatgaagctgtgcgtgctggtaattttaaagatgcgtatactccttggaaagctgtgttggaaaactgtccgacgcttcgtttctatacctttactgacggatataagattctgaaaggcttgatgggacaaatcaaggatcggaataatgcagattatcagaaatattttaatgaactgatgaatacgcatgacttgcgtattaaatacacagatgagtttctagctaaaggtacaaaagtgtcttctgccgacgaagctctgggtatcaaagcagtagattatatcgcttttgctccgaagattgatgtgaaccaggcttatcaatggttgagtcagtctgtaaatgctgtgaaaggcgaatcggcaggtgcgactatcttctatttcctgcaaatgtctttggataaactgaaaacggatccgaatcataaagaacagttcattcaggactatctggctgcttctgaatatgtagacgctgctattgctgctgaagccagcgaagcaaagaagaaacctttgctgggtatcaaggataacttagtggctttgtttgtaaacagtggaacagctgattgcgaatcactgcaaaacatctatggaccgaaagtagaagctaaccagactgacttggcttacttgaagaaagttatcgacatcatgaaaatgatgaaatgtactgaaagcgaagcttatttgcaagcatcttactatgcttataagatggaaccgacagcagaagctgctaccggatgtgcttatcaggcatttaagaaaggtgatattgacggtgctgtgaaattctttgacgaagcagtgaacctggaaacagacaatgtgaagaaagctgaaaaagcatacgctgccgcagcagtattggcttctgccaaaaagctgtctcaagcaagagcatattgccagaaagcaattggttttaacgaaaactacggtgctccatacatcctgattgctaatctttatgcaatgagtcccaactggagcgacgaacctgctttgaacaaatgtacttactttgcagtgattgacaaactgcaacgtgcaaaacaagtggatccgagcgtagctgaagaagctaacaaattgatcggtagatattctggtcatactccgcaagctaaagacctatttatgttaggttacaagcaaggcgaccgcatcactatcggcggttggataggagagactacaacgattagataaatgtatgttgcgaaaacgaagaaaccgtttattgcataaaagcatgagcataacaatcaccttcggggtgattgttatgcttcttttattatcttcctgtggcggaaagaagaaagctatgggtgaggctatcacggaacgtgattcccttccgatgatgacaacattgggagtcaccacccttatctccgattccggagtgacacgctacagagtgaatacggaagaatggtcggtgtacgaccgtaagaaaccatcctattgggcctttgagaagggcgtatatctggaacagttcgactctatctttcatatagaagccagtatcaaagcggatactgcctactattatgacaaagaaaggctttggaagctgatagggaacgtagatatacagaaccggaaaggagagcgttttaatacggaactgctgtactggaacgaagctacccaaaaggtatattccgacaagtttatacgtattcaacaaccggacagaattattacagggcatggattcgactcgaaccagcaaatgaccatatataccatccataatatcgaaggtattttctatgtggatgaggaagcaggtggtccgccccaaccggaaacaaaagcgctgccggattcagtgcgaaaagattctgtgaaataaactatgaatatttatatctctctaattatcaccatggtcttctcagccttcttttcaggaatggagattgcctttgtgtcggtagacaaactgcgttttgagatggaacgcaaggggggaattacgtcccgcattctttccatcttcttcaagaacccgaatgaatttatctctaccatgttggtgggaaataatatcgccctggtcatctatggtatcctgatggcacagattatcggcgacaatctgctggcgggattcattgataatcatttcctgatggtgttggcgcagaccgttatttctaccctgattattctggtgaccggagagtttttgccgaaaacaatcttcaaaatcaatcccaatctggtcttgaatgtttttgccattccgcttattgtttgttatgtggttctctatcccatctccaaattagcctccggcttgtcttgtatcttccttcgcctctttggaatgaaggttaataaggatgcgtccgacagagcttttggaaaagtcgacctggactatttcgtacaaagcagcattgataatgccgaaaatgaagaagagctggacacggaagtgaaaatcttccagaacgccctcgacttctcgaacataaaaatccgcgactgcatcgttccccgtaccgaagtggtggctgtcgatctgactacctcgctggacgagctgaaaagccgcttcatagaatccggaatctccaagataatcgtgtatgacgggaatatcgataacgtagtcggctatatccattcgtcggaaatgttccgtgctccgaaaaactggcatgagaatgtgaaacaagtgccgattgtgcccgaaaccatgtccgcccataaactgatgaaactcttcatgcagcaaaagaaaacgattgccgtagtggtggatgaatttggcggtacgtccggcatcgtgtctctggaagacctcgttgaagaaatctttggagatatagaagacgaacacgataacacttcctatatcagcaagcagatcgacgaacgcgagtatgtgttgtccgcccgcctggagatagaaaaagtcaatgagacgtacggactcgatttgcccgagtcggatgattatctgacagtaggagggttgatcctgaaccaatatcagagcttcccgaagttgcatgaagtggtccgggtaggacgttatcaattcaagataattaaggtcacagcgacaaaaatagaactcgtgcgattaaaagtcttggaataatgacgataatcaagaaatttttagccaataaatagatgcatattagcattttttgtatcttcgtgcgctaaaacgacaaaagaaagaaataataataaacataaatcgtattaatcaaaatggcaacgttacaaaacattaggtcgaaaggacctctattggtgattgttatcggcttggcgctgtttgctttcattgcgggtgacgcatggaaggtgatgcagccgcatcaggcacatgacgtaggtgaggtgaacggagacgctctttccgctcaagagtatcagaatttggtagaagaatataccgaagtggtgaaactcatgcgtggggtgaccgccttgaatgacgaacaaaccaatcaggtgcgcgatgaagtatggcgttcctacgtaaacaataaactgatcgaaaaagaagcaaaagcactgggactgactgtttctgctgctgaaatccaggacatcctgaaagcaggcgttcatcctttgttgagacaaactcctttccagaatccgcaaacaggaaacttcgacaaggatatgttgaacaagttcctcgtggaatatgccaagatgagcgaatcacaaatgccggcacagtatgctgaacaatacaataacatgtataaatactggtctttcattcagaaaactctgatcgagagccgtctggcagaaaagtatcaggcattggtgtctaaagctcttctttctaatccggtggaagcacaggacgctttcgatgcaagagtgaatcagtacaacgtgttgatggctggtattccttactcttctgtagtggactctacaatcgtagtgaaagaatcggaactgaaagacttgtataacaagaagaaagaacaattcaagcagtatcaggaaactcgtgacatcaagtacattgatgtacaagtgactgcaagtgctgaagacagagctgctatccagaaagaagtggacgaagctactgaacagttggctactactacggaagattatacttctttcatccgctcgactggctcagaagctccttatgtagacttgttctataacaaaacagctttcccgtcagatgtagttgcccgtttggactctgcttcggtaggtactatttatggtccttactataacggtgccgacaatacaatcaactctttcaaaattgtagctaaagctgctgctgccgactctgttgaattccgtcagattcaggtatacgcagaagatgctgtgaagacaaagacattggctgatagtatctacaacgcgatcaaaggtggtgctaactttgctgatctggcaaagaaatatggtcagactggtgatgcaaactggctaacttctgcacagtacgaaggtgcacagatagacggtgataacctgaaattcatctctgctatcaataatgcaggtgtaaacgaactggtgaacttgccgatgggacaagcaaacgtaattcttcaggtgactaacaagaaatctgtaaaagacaaatataaagtagctgttatcaagcgtgaagtagagttcagcaaagaaacttacaaccgtgcttataatgatttcagccagtttatcgcagctaatccgagtgtagaaaagatggtagctaacgctgaagaagccggttacagattgctcgacagaatggatttgagcagctctgaacacaatatcggtggtgtaagaggtacaaaagaagcgttgagatgggcgtttgataaagcaaaaccgggtgatgtttccggcttgtacgaatgtggcgaaagcgatcacatgatggtagtaggtctggtaggcattaagccggaaggatatcgtccgttgaaagcagtacaggatcagttgagagctgaaatcgtaaaagataagaaagctgaaaagattatggctgatatgaaagctgccaatgcaacttcattcaaccagtacaaagagatgactaatgcagtcagcgactctttgaagatggttacttttgcagctcctgcatacgtatcagcattgcgcagcagcgaaccgctggtaggtgcttatgcttctgcagctgaagtaaatcagttgagcactcctatcaaaggtaatgccggagtatttgtattgcaggtatacggcaaggacaaactgaacgaaacattcgacgcaaaagcagaagaagctacgctgactaacatgcacgcacgttttgccagccgtctgatgaatgatttgtatctgaaagcaaacgtaaaagatacacgcttcttgttcttctaaacaagtagcaagtaatagatattaggcacggattacacggatttacgcggtttaaacttttgagggaaccgcgaaccccgtgtaatccgtgccttttttgtgctcgttttttttgtttatggcctttgttatctgattaaatttccatatcttgccaatctttatcaattggctttgcgaaatacttcattaactaatacgaatctatattatgactaaacaactagcccagtattcagttcccgctgaaaattcacgtgttatccgtgttttcctttcgtcaacgttcagagacatggagatggaacgttctgcattagtcaaactctttaagggtttgcaagtgaaggctgccagtcgtggtgccaccatttcattggttgatttgcgttggggaatcacagaagaagatgcgaaaagcggcaaggttgttgaaatatgtctgaaagagatcgttaactcccggcctttcttcattggtatggtaggcgaccgctatggatggtgtcccagttatgaagatttatctcaaactctgaatgacagcttggaatatcgttggatagaagatgacttgaatcaccatttgagtgtgacggaaattgaaatgcagtttggtgtactgcgcaatcccaatccgttacatgcctatttttatataaaacagtcggcagatgatgaactgtcttgccctgaagaggagtctcttaaattgaaacgtctgaaagagagtattttgcaacaggatcgttatcctgtgcaggagtatgattcgcccgagcaattgtgtgaccttgtggaagctgctttcacggaattgcttgaacgggagtttccggatgtactgaccgttgaagataatcaagcattgcaagaacaactgacgcgcaatgaacttttattcaattatcacccaatacctgaagcagaacaggcgtttgctgattttttggcggtggatgaacagcggtgcctggtggtaacgggcggttgcggtcttggcaagagcgctttgttggctcattggagcgatttggtgaacaatgatatgccgatgattcctatctatcatcgcttggatagtactacattgtcttcttatccggaaacgttggcgagaatgttagcttccaaatgccagaacgcactcaagcatcaatctttgggtgaagaaaatttgttcgcggcggaagtttcaaaagaactggactcgacccaaagcactgccaaatccatcatggacgccgtgaaaaactcggttttgatgggagatgctggcttgaacactttttcagggaatacacttcgaaacctcaaggagattgaagaagatttgaattctatccaaaagttcagtcagttgtggagtgcgttgggtgcatcaagatatcctatcattttgctgattgatgacatcagttatctgaatccgactgaagcatccctgttttctttatttgcatctattcccccgaatgtgaaagtcgtgttgagcttttcggcgtcatccactgcttacctgccctttgttcagaatggctacgctcatttccagttgaatggcttttcacaggcggatgccaagtcgttctcaaagcaatatttgtctacttactccaaggctttgtctgcacagcaggaagatattcttgcttcgtgggtgctggctgaacaaccgcgctgtttaagtgtattgctcaacgagctggtttcgttcggtcagtacgatgctctcaatgaatatatgcgtggatattgccggctcaatgaggttgggcaattctatgacagtgtgctacggcgtttgtcggctgattatggttccgaagagattggaagaacgcttctgatgctttcacttactttagaaggatttaccgaagatgaagtgaagagcatggcagacattaatcagatactttggtcgcagttgagagtggaaatgagcagctggctcaccaacaaaggaggacgatattgcattggtgatacacaaatggtagaggcgatcgaacgctatttcgctcaagatgacgaatgtatagatgatagtcgccatgaaattatttccgctctgctggatgaggaagaaatcctttcccatccgttgacttttgccgattataactatcgcatgaaacagttctgctaccatgattcgtatcgctataaagtggagattacctatcaatgctataagatgcaagaatgggatatattgaaggattggatttgtgatgtggagattttcgagattctgtatcgcacgaatcgttttctgttggaagatagctggaaggcgatcatgaacgacaatcctgaagttacgcctgaagtctatgccgaattggactttgatgagatcgattcttttttaattcctgtcattgctaatgatatggctactttcttgagcagttctttccatctgacgaaggcggcagctgctgtgagtgagaagagtatggaaggtgctgccatgccactcattgccaagtcggtattgaagatgaatgagggatgccggtatgcccgtaatgaagagtacgaaacggcatgcgactgtttcctgaaagcattggtgatgcaggaaaacattgtgccgactccggaactggagattgccaatacctgccgaaatctagctctggcatattactacaatgagcaatacaatgaagcggcgatctatttgaatagggcgcttgattatcatgcggcttctgctgacgagaagagtcaggcagaagtcattgaactttccgaatatctggcttattgtgattactataaggatgaggaagagagtgctgccgagaaattccggaaagtagctgaaatgcacgagtcattgaatggcagactgtccggtggagtggctaaatgtttgcgtatgcagggtaaatgtctttattatatcaaacgatacgatgaagcatggatgctgatgaatcaggcgttggacattgctatacagatagatagcaaaaaacagatcgtcgcttgtcataaacagttgtattatctgtgcagggaattcaaacggatgatgaatgaacgtggcgatgagcaggcgtctactttattcttccgtgagtctcttctgcatgaaatgtatttcagcgaaaaaccgcgtctggcggaactgactgtccgatatgaggcattgagatgtgatattatgcagcagtattacatgaataaagactatgataacgtgattcgtattgcgacgtctttggatattcacgatgatgctgaccctaatgcttcctgtctggtatattattacaaagcacaggcttatgtgaagttggagaattatccaatggcgaaagaggctttcttcagagaacttgaactgcgaaagaagtatttgggatgggaggaagaagatacgattctggcttgtcagaacttaggggttttgcacagcttttgtaatgaacgggaagaggcgctggcttgtttccgtgaggcgtacggttatgaagtgaaaaagaatggcgaggattctgaaatggcgcaaaagctacttcaatatatcagcgtggttgaatcataacggaggcatacttcccttttttgttaacttttacattcctgctatacggaaatcgactttatttccttacatttgcagatataaactatcaacagaaagaagaatgtctaaatatccccttttaggaatgactcttgtagagcttcaatcattgacaaaaagactgggtatgcccggctttgctgccaaacagattgcatcctggctttacgaaaagaaggtagcctcgattgatgatatgactaatttgtcattgaaacaccgggagttgctcaagcagaactatgaggtgggagcggaagctccggtagatgaaatgcgctctgtagatggtacggtgaagtatctttataaagtgggtgagaaccattttgtagagtcggtttatataccggatgatgaccgggcaacgttgtgcgtgtcgtcacaagtgggctgcaagatgaactgtaagttctgtatgaccggcaaacaggggtataccgctaacctgaccgccagccagatcatgaaccagattcattcgctgccggaacgggataaactgactaatgtcgtaatgatgggaatgggcgagccgctcgataacctggatgaggtattgaaggcattggaactactgaccgctacctacggttacgcatggagtccgaagcgtatcacgctttctacagtcgggctacggaaaggattgcagcgttttatcgaagaaaatgactgccaccttgccatcagccttcactctccgctgaccgttcagcgtgctgaattaatgccggcggaaaaggcgttttcaatcaccgaaatggtggaactgttaaaaaactatgattttagtaaacaacgtcgactttcgtttgaatatattgtttttaaagggctcaatgattcgcaggtctatgccaaagagttgctgaaacttcttcgcgggctggattgcagggtgaatctgattcgttttcatgccataccgggggtagacctcgagggggcggacatggatacgatgacccgttttcgtgattatctgacgtcacacggacttttcaccactatccgttcatccaggggcgaagatatttttgccgcttgcggtatgctgtcgacagcgaaacaggagaaaaataatgaaagttaatatataaaaccgaacatcatgaaaaagtactcttttattttatgcatcgctttggtagcctttgtcgttgcatcttgcggtctgaaaggaaatcacacctctagtggtcgtgcttacgagcttttggttgtagtagatcacggtgtttgggatcgtgctgccggaagggctttacatgatgcgctcgatgctgatatgcccggtttgccgcagtcggaaccttctttccggattatgtatacttcaccgaaagattatgattctacgctgaagttgatacgtaacattattattgtagatatacaggatatatatacgaaagcctcgttcaaatatgcgaaggacgtgtatgccaatccgcagatgatattgactatccaggctccgaacgaagaagaattcgagaagtttgtggaagagaacaaaaagacgattgtcgacttctttacccgtgcggaaatgaaccgtcagattacgttcctggaagggaagcatagtaacttcatttcgcagaaagtggacagtttgttcggatgcgacatctgggtggatgccgaactggctaattcaaagaccggggatgatttcttttgggcttctaccaacacaggtagtgccgaccgtaactttgtgatgtactcttatccgtacactgacaaggatacgtttaccaaagaatattttgtgcacaaacgtgactccgtgatgaaagccaatatccccggattcaaggaaggcgtttatatgtcaaccgatagtttgctgaccgatgtccgtccgatcaatgtacagaacagctacacaatggaagcacgtggcctgtggcgtatgaagggcgactttatgggtggcccgtatgtatctcatactcgtctggacgagaaaaaccaacgaattataacagcagaaatatttgtttattcacctgataaaatgaaacgcaacctggtacgccagatggaagcatctctgtatacactgaaacttccgaatgaagttcagcagaatcagattccattgggagaagcatctaaggaagcggaacaaactaataaataaaaacatggaagataacaagataaggataggtatcacccaaggagatattaacggggtgggctatgaggtgattcttaagacattttccgaccctacgatgttggaactatgtactccgatcatttatggctcaccgaaagtagcggcttatcatcgcaaagcactggatatacagaccaatttcagtattgtcaactctgctaccgaagcggggtacaaccgtttgagcgtggtgaactgtacggatgatgaggtgaaagtggaattttccaaacccgatcccgaagccggtaaagctgcgctgggggctttggaacgtgccatcgaagaatatcgcgaagggttgatagacgttatcgtaacagctccgatcaacaaacatacgattcagtcggaagagttctccttccccggacatacggaatatatcgaagaacgtctgggtaatggtgataagtcattgatgattttgatgaagaatgacttccgggtggctttggtgacgacacatatccctgtcagagagatcgcgactacgattaccaaagaactgattcaggagaaactgatgatattccatcgttgtctgaaacaggatttcggtatcggcgctccgcgtattgcggtgctctctctcaatcctcatgccggagacggtggtttgttgggaatggaagagcaggaagtgattatccctgccatgaaagaaatggaagagaaaggaatcctttgctacggtccttatgcggccgacggctttatgggttcgggcaattatactcattttgacggtatcctggcgatgtatcacgatcaggggctggctccgttcaaggccttggctatggaagacggggtgaactatacggcaggcctgccggtagtacgtacttctccggctcatggaacggcatacgatattgcaggcaagggagtggcttgtgaagattctttccgtcaggcaatctatgttgccatcgatgtgttccgtaatcgtcagcgggaaaaagtggctcgtgccaatccgttgcgtaaacagtattacgagaaacgtgacgatagtgataaactgaagctggatacagtagacgaagattaaaaacgagtgatgacgagagcagagatacaacaagtgaaacagcgtttcggtattattggaaataccgaagcattgtcgcgcgccatagatgttgccattcaggtagctcctaccgatttgtctgtgctgattaccggagaaagtggagtcggaaaagaaagttttccgcagattattcatcaatatagccggaggaagcatggacagtatattgctgtcaactgtggtgctattccggagggcacgattgattccgaactgttcgggcatgagaagggtgcgtttaccggtgcgattggcgaacggaaagggtactttggcgaagccgacggtggtactattttccttgatgaagtaggggagttgccgatgcctacccaggcgcgtttgctccgtgtgttggagagtggcgagtttataaaagtaggttcgtccaaagtgcaaaagacggatgttcgtattgtggcagctaccaatgtcaatctgacacaagcgattgcagaaggacgtttccgtgaagatttatattaccggttgaatacggtgcctatccaaataccgcctttgcgtgaacgtggtgacgatgtacttttgttgttccgtaagttttccgcagactttgcagagaaataccggatgcctgctatccagttgacggaggatgcgaagaaagagttattggcttacccgtggcccggcaacgttcgtcagttgaagaacatcaccgagcaaatatctatcattgaaaccaacagggagatctctgctgctatcttgcagaattatcttcctgcacaaaatacgcaacgtcttcccgcgctgatgggaacgcgtgagagtaaaggctttgagagcgaacgggagattctttattctgttctgttcgatatgcgccaggaagtggcggagctgaagaagatggtgcacaacctgatggcggaacgtgccggacaggtggggcaggtaggacaagtgggaacggtggttactactccggtagtgacgacacaccagccttcggtacctgcgatcattcataccatgcagcctgcggtttgcaaggatgatgacgacatacaagacacggaagaatatgtagaagaacctcctttgtcactggacgaagtggaaaaagaaatgatacgcaaagcacttgaaaggcatcacggaaagcggaagagtgcggccaaggacttgaatatttccgagcgtacactttatagaaaaataaaagaatatgaattggattaagaaaataatacgccctttgctactgttcggcttgccgttggtagtcattgcgtgcactgtttcctataagtttaacggatcgtctatcaattatgataaggtaaagaccatttcgatagccgacttcccgatcaagtcggagtatgtatatgctccgttggcaaccaaattcaatgaggacctgaaagatatcttcatccggcagacccgtctgcaactgctcaagccgagtcaaaatgccgacttgcagattgacggagaaatcacagggtacaatcagtacaaccaggcagtatctgccgacggttattcttcggagacgaagttgactatcaccgtcaatgtgcgttttgtcaacaacaccaatcatgccgaagactttgaacaacagttttctgcgttccgtacctacgactctacccagttgttgactgccgtacaggacggattgattgctgaaatgtctaaagagatcaccgaccaaatttttaatgcaactgtagcaaactggtaatataaatgacttctgttaactttcaacaatggattcagcatcccgagacgctgaatagggatactttgtacgaactgcgcaatcttcttgcgaggtatccgtattttcagtcacttcgtctgctgtatctgaagaatctgtatattctccatgatattagtttcggtggagaactgcggaaagcagttctttacattgcagacagacggcagttgttccggttgattgaaggtgaccgctatgatgtgcaggcacggaaaaagggagtacctctcacggaggtgctgaaagacgaaccgtccgtagaccgcacattagcattgatcgacgctttcttgtccacagtacccgaagaggtgactgcccggaccagtttcgactattcgatggattacacctctttccttttggaggagactccggccacggaacagccggctgaagaaacgcccaaactcaaaggcttcgaactgattgacgactttatagaaaagagcgagagcgactctcccctctgcatgaaacctttaagagaagaaatgccatcttcgccaacctcttcggacgaacttaccgaagaagaaacgatgaaggaagaagaggaagatgacagctgttttacggaaactttggcaaaaatctatgttaaacagcaacgatattcaaaagctcttgaaataattaaaaaattaagcttgaaatatccaaaaaaaaatgcttactttgcagaccaaatcagatttttggagaaattgattattaacgctaattcaaaataactaaaaatgtacttattattcgttatcttaatggttattgcagccttgttgatgtgtttcatcgtgctgattcagaactcaaaaggaggcggacttgcttctggtttctcttcatctaacgccatcatgggcgtacgcaagactacagattttctggaaaaagcaacatggggcttagctatcttcatggtggtaatgagcattgctactgcttatgtagttcctcgctctgctgttgctaaagacgcagtgttggaacaggcacagaaagaacaacagactaacccgtataacttacccgcaggtacggctgcgccgcaaactgaagctcctgctaccaatgcacctgctacagaaactccggcaccggctactgaaactcctgctcctgcagcagagtaattcactccgttgtcaggtaagactttggggtaaaaccattaatgggaaggtgcagacggatgctgcatttctttgatatttaagtgcggattacgcagattacacggattttcaatcttccgcgtggtcagtgtaatccgcacttaactttttcttgtaaaaacaatctctttttgatagaaacaaacgagatttaactacctttgttggtcgtatgaagattattaactactatttttaaatataacaatgacagaacatttgaaacagaaattgaatgactccgccgtactccgatggagtgttctagcattggtcgcatttactatgctatgcggctatttcctcaccgacgtaatgtctcctctaaaacccatgcttgagaaagaactactatgggacagtcttgattatggtttcttcacaagtgcttacgggtggtttaatgtattcctattgatgctgattttcggtggtatcattttggataagatgggagttcgttttaccggaatgggagcttgcttattgatggtgtttggttgtggattgaaatactatgcgatttctactacttttccggaaggtgccatgctcttcggattcaaaacacaggtaaccctggctgcattggggtatgctatcttcggtgtaggtgtggaaattgccggtatcacagtttccaaaattatcgtgaaatggttcaagggtaaggaaatggcattggctatgggacttgaaatggctacggcacgtatcggaacaactctggcaatggtgctcacggttcctttggccgactttttcggatctacggatgagagtggcacatttcataccaatattcctgctccgattttgttttgtctgattatgttgtgcgtgggtacgattgctttcttcctttatactttctatgataagaagttggatgcttctttggatgcagaaggattggagccggaagagccgttccgtatgaaagatattgtgtatatcattaccaataaaggattctggctgattgcattactatgtgtattgttctactcggctgtattcccctttatcaagtatgctgccgacttgatggtgcagaagtataacgtagatccgaagttggcgggaacgattcccggattgttgccgattggtgcgattatcctgactccgttgttcggctcgctttatgaccgtatcggtaagggagccacattgatgataatcggatcagtgatgcttatttttgtgcatacgatgtttgctctgcctatactgaatatatggtggtttgctactatcatcatgattatattgggatttgccttctcgttggtgccttcagctatgtggccgtctgttccgaagattattccggaaaaacagttgggtaccgcatatgcattgattttctgggtacagaactggggattgatgggtgttcctttgttgatcggatgggtgttgaatacttattgcaaaggtccggtagtagacggtgcacagacttatgattacacgttgccgatggctatttttgctctctttggtgtgcttgctctgattgtggctttgatgttgaaggcagagaacaagaagaagggatacggtttggaagaggcgaatatccaaaagtaactaggaaattcaatacctaaagtaacaaaggaattttgtatcaaggtgtaaacagaagagtatcagtatgaatactctgaaataaaaaataagaagtatggctgccaaagagaaaatcaacctgttagaggtcattccctgtcgcagtgaacatattacagcagaaagggaaggggagacaattgtgctctcctttccccgttttaaatatccgtggatgcaacgcttccttgtgccaaaaggaatgtcgaaagaacttcatgtgaaattggaagaacacggtacagctgtatgggaactgatagatggaaaacgcaatgttcgtgagattatagaaaaactcgcagaccactttcaaaatgaagagggctacgagttgcgtgtatcggcttatctttctcaaatgcagaaagatggatttataaaactggtgataccagtcgtataaataggaacttattattatttatttgataaatacagcccaaagtatgacggcaattgctatcaggactcccatgataataagcgttccccaaacaaaataattgctgtctttctctttctttttctccgagtcgtggatgatacgttccatttcttcgggggtggtgttgggtagtggataaggttcgtttgcacggtttagatgcttcaacttatcgttagcacgttcacgacgtaggcgggaagcttcccgtccctcttttattcggcgtatcatgtcgaatgcatgtccttcaccaaccatattctttgttttttagaagttcacttccttcgtttttctatttcccttcttctctgtccactttgagcaatcctcccgtattcggatcaaaataaactttgatggtagaattcttattgaacaaaaccggagccagatattctatcacaccgaattgggtaataggaagctcaccttcgtaaagtttctttttaccgtcagtcagtgtaaccatagcttgtccgggtacgttgtaggcgattccatccaaatctttcttcttcttatcgtcttcctgtggtatcttgaccgatttcaggtctttcagactgatataaaacggagttcctgccaaatcattgttggcaactacacctaacttcttcgaaaagcggaaagcaacttcattgttgaattccttgtcaggggtaaggcggacagtgaatgttctttcttctttgttgcaggtgccggagaacatttgcgtcatggcttcttcctgtgcattcagattgtcgagcataattttaagctgtgctccgtctgaaggcatattatcagcctgtccgcgcaataaggcatttttgctttcgcggatattatagatttctttagccaccagctcggccatcttggcggtggaactagccatcagaatctcttcggtcaggaattcgcgaggattcgctttcttttggaggactgcgggggcgggagcagcttttttgcctacactgctattgctgtaaggaacattgatcgttttcacaatgccatcctctgtcagttccatgagcggtgctactgtcttatccttcaattttacgaaatacgtagtttcgctgttgggcacacctacggatttcacttttacgctagctagttcccagtactcttcagggtcggcggagacgttggtcagtcgcaggtaacgatcagcatatttgctgaattctcccggagtatagttgactttgttggcttttatttcaagttctatttgggttttgggaagactgtaaaccactccatagtcttttcctcgggtaacccctgtcagtacttcggtttgtgcataggcggacgttgtcattagtagtcctgctgctataatcaactttttcatattcggttcttttttaactggttttgaaaacaaagttaatgaagttattgaaaaaactgtaagttcttaacttttattcgcttacaagtcgccatgctgtcggcagacaggtgataatatcgcttgcgatcattccgatcattccttgcttcttttgagcgacatcgcccgccaatccgtgaatgtaagtgccgattttagcggcttcttcggtgggataaccttgggcaagcagcgccaggattactccggtcagtacgtcaccgctacctccggttgccattcccggatttccggttgggttgaagaaacatttaccttcgggggtgatgatggcggagtaggctccttttaaaataatgtgaacatgggcggcacgggccagttcgcaagccttcatcagacgttcgtaagagtcctggcatttgccggtcagacgttccagttctttcggatgcggggtgaggatggaacccttcggcaggtgggtaagggcatggcggtggttggcgaggatattaagtgcgtcggcatccaccacaacaggagtatggcaatgttccagttgctccaataaagcagcttccgtttcctcgtttcgtcccagccctgggccgatgccgactgcttgatagtcgtccgtgtcggtaggtacggcaaaacaggtttcgttgatgtcggtttctacgattgcttcgggtatggaggtctgcaagatgtcgttgttgcacattggcgcatggacagtcagcaaccctactcccgaacggaggcaggcgcgggcagcgagaacagaggctcctgccattccttttgaaccggcaatcaatagtgcatggccgaagttccccttgtgggcaaactgtttgcgtggcttgatgagtgaacggatttgctctatttccaacatttcgtagttcgtttccatctcttcaataccgtcttcgcttaattggatgtccagcacttcccattctccgacaaattccgtgttctctgcgaaaagaaaggcgagcttcggcagttgcagactgaaagttacgtcggcacggataatattagcttttacgttgaatgtgttttcttctcccatcagtccggaaggaatgtcgatggctactaccatagcaggggaggaattgatgtatttcactacggcagcgaatccgccgcttaacggtttgttcaggcctgaaccgaataatccgtcgattaccagatggtcgggcgtcaggacgggaggtacgaattgggtactgatttcgtggaattttacttcttccatcatttctaccagttctttattggtttggcagtcgggtgaaagttctcctttcgtgttgaagagaaatacctcgattttatatcctttttcagccatcatgcgggctacggcgagagcgtctccgccattattccccggtccggcaaagatagtgaccggcgtttccgtattccatctgtctgtgatggcttttgttaatacggttgctgcacgttccatcagatcgattgatgcaataggttcgttctcaatggtataagcgtccaatttcttgatactgctgcttggaaatattttcattgcgatgttcttttagttttcggattacaaatgtacatgattcttctgacttttcccgtttgttgtgggaagaaaaccataattgcaacttttaattcatcattagttctatctttgggtcagagaaatatctgcttttgaactattaagtgttagaataactccgccaaaaaataattcaatgcagcaccattatgaacttacttttatttctcctgaaaaagatttggttcttaatcaaattccgtgctagtaaagctcattgaaaggccgatggataaagggatatcggcatattagaaatagcaaataaattatccaaactatatgcatcttaaagtactccggaatagccatgaataaggtaattgaacataaataagtagcacggaatttgaagaagaaccaaagatttcttcatttcatttctcatattctcattgtttttcgataaacgaaagctaatcaaatagatatcttatgagaaacactttttcgaaacggtatttctcataagttctcccatattttggctcaaaagccaccttattctcatagtatttcagggtatttctcatagtcaaaagccatttgttcttccttttttctttcagcctgccttatttttatcaggaaatgaagctactatttagataaaatagtggctttttgcttgaagatgctcattggtctcgattgtcccatatattgtgggaaagttttccttcaatatacgggaatactttcccacaaaataagggaatactttcccaagccttagggaatcttttcccacaatatgtggaactaagacactgtgtatggaagcaagcaaaaggaatacatagttttatttattcaatgtcagcttccggcacactacactatgagaaatgaagcaaaatccgggttattttgcgaagaaactatgagaaatgcctgtttttaaatcatttctcatagtctatcttattagtttactgccacttgtttcttatttatgagaatatgagaaatgaaaaatctttttctgtagaggcgcggatggaaattgtgtttagtttatcgccataccttcttaaacaaatttttaatgcagttccccttattaagcctttgattatttgccgtttccgataaaaatgttatctttggagatagataatgtgcatcacatcattttccagtgctcacaatgaaaatgaattaaaatctaaataacggattgtttaatcttctaaagtttgcatgatggaaaagacaaaaattggcttgaatgccgggaaagtatggcgcatcttaaatgaaaaaggtgaactttcaatgttcgatttgtgccgtgaattaagtttgacgtttgaagacgtagctcttgctattggttggctggcccgagaagacaagatctttttgaggaaaagagaaggaatgctttttgccagtatcgaaaatgtcgaatttacttttggctaaggtggtagctaacctacatttaagatggatctccactttattatttacactgctaaaaaagtaatgaagtggatcagtaggattttttatgctcgtttttactattccccctattattctgtttgataagagaagcatctaatctactttttctgtacctttgcaccccataaactactaaacacataaattcatgagtgcattgaaagggcatccgaaaggcctttatctgattttcgcgacaagcacggcagaacgtttcagttactacggtatgcgtgcgatctttattcttttcctgacgcaggcattattgtttgacaaagaagcggcagcatccatctacggcagctataccggactagtttatttaaccccgttgattggcggatacattgccgataaatattggggaatccgtcgttctgtgttttggggagcggtgatgatggcagtcggacaattcctgatgtttatgagtgcctccactttagataatacaaaccttgcccactggatgatgtatggcggactaggcttcctgatcttgggcaatggttgcttcaaacccactgtctcttctctggtaggtcagctctacgaacccggagacaggcggctggatgctgcatacaccattttttatatgggagtgaatgtaggctcttttgctgctcctttgatttgtggttatctgggtgataccggtgatccgcatgactttaaatggggatttcttgcagccggaatcatgacactgttcaccgttgtccttttcgagactcaaaagaataaatatcttttttctccttccggagaaccgattggtattatccccgatgctaaacgtgaaaagaaagaagacaaggccgaccatatctcacacccgaagatggacaaacgtaccaaagtacgtaatacccttgtaatcacaattcttaccattgctttaatagccttctttaactatgcatttgaaggcgattgggtgagtatcggcatttttaccgcctgcattgttttccctgttctgattttgttagacggttcattgaccaaaatagaacgcagccgtattttcgttatctatatagtagccttctttgtcatcttcttctgggcagcctacgaacaggcgggagcttctttaactctttttgcgtccgaacagacgaatcgtgacattttcggttgggaaatgccggcttcatggtttcaatccttcaatccactgtttgtagttgtcctggcatatatcatgccgggtgtatggggtttcctaaacaaacgaaagatggaacccgcttctcctaccaaacaagcgattggtttgttactcctttctttaggttatcttttcatctgtttcggagtgaaagatgctgttcccggagtgaaagtgagcatgatttggctgacaggactttactttattcataccatgggtgaaatagctttgtcgcctatcggactttcaatggtaaataaattgagtccgctgcgtttcgcctccctgatgatgggaatctggtatctgtctactgccacagccaataaatttgcgggaatgttgagcgggctctatccggaagccggaaaagtgaagtcaatctttggttatcagattgctaccatgtatgatttctttatggtattcgtcgtgatgtccggtgttgcttcgttgattctgttccttctctcgaagaaattacagaagatgatgcacggggtagaataaaaaatcgtatttttgcaaggttatttttaaattaccggttatggataccattcagataaaagacaaattgtttaccgtttctattaaggaacaagaaattcagaaagaagtgattcgcgtagcgaacgaaattaaccgcgatttagcaggtaagaatccgcttttccttagtgtgttgaacggttcgtttatgtttaccgctgatttactgaagcacatcaccatcccttgtgaaatctcatttgtgaagttggcgtcttatcagggcatcacttccaccggagtgattaaagaggtaatcggcctgaatgaagacattgccggacgtaccattgtgatcgtggaagatatcgtagacacaggactgacgatgcagcgactgctcgaaacattaggtacacgcaatcccgaagctattcatatcgcttctctgttggtgaaacctgaaaagctcaaggtaaacctcaacattgaatatgtagcgatggaaatcccgaacgactttatcgtaggttacggactggattatgatggtttcggacgtaattatcccgatatttatacagtagtagattaatattaaataggtaccagtttaaatggtaaatagtaaatcgttaaattgtaaataacaaaatgttgaacatcgtaattttcggtgctccgggttcaggaaaaggaacacagagcgaacgtatcgtagaaaagtatggaatcaatcacatctcgacaggagatgtattgcgtgctgaaatcaagaatggcacagaactgggtaaaacagctaaaggttacatcgaccaaggtcaattgattcctgatgaattaatgattgatattctggcaagcgtattcgacagcttcaaagatagcaaaggggtaattttcgacggtttcccaagaacaattgcacaggcagaagcattaaagaaaatgttggcagaaagaggacaggacgtttctgtaatggttgacttggatgttccggaagaagaactgatggtacgtctcattaaacgtggcaaggattccggtcgtgctgatgataacgaagaaacaatcaagaaacgtctgcatgtatatcattcacagactgctccactgatcgactggtacaagaacgaaaagaaataccaacacatcaacggcttgggtactatggaaggtatcttcgctgaaatctgcgaagcagtagataaattgtaataatacaatattataaataaataagtcagtagccggagtgttctaattaactgctctaactactgactactttaacttttaaaaaaaatatggctgaatcgaattttgttgattacgtaaagatatactgtcgctcgggtaagggcggaagaggctctacgcacatgaggcgcgagaaatattgtcctaacggaggtcctgatgggggcgatggtggaagaggaggtcatatcatcttgcgcggtaaccgtaattactggacattgctgcacttgaagtatgaccgtcacgcaatggccggtcatggtgaatcggggagcaaaggacgtagcttcggaaaagacggtgcggataaaataatagaagtaccctgtggaacggtagtttataatgccgagacaggggagtatctttgtgacgtaacagaagacggacaggaagtggtcttgctcaaaggcggccgcggcggtcagggtaactggcattttaagacggccacccgtcaggcaccgcgttttgcgcagccgggagagccgatgcaggaaatgaccgttatcatggagctgaaactgcttgccgatgtcggtctggtaggtttcccgaatgcgggaaagtcaactttgctttcttccatttcggctgccaaaccgaaaattgccgattacccgtttactacgctcgaacccaacttgggcatcgtttcctatcacggtggaaaatcctttgtgatggcggacataccgggtattatcgaaggtgccagtcagggaaaaggtttgggactgcgtttcttgcgtcatatcgagcgtaattcattactgctgtttatggttccggcagacagcgacgacattcgtaaagaatacgaagtcttgctgaacgaactgcgtaccttcaatcctgaaatgttggacaagcaacgtgtgttggctgtcaccaagagtgatatgctcgatcaggagttgatggacgagattgaacctacattgccggaaggcattccacatgtattcatatcttctgtttccggtttgggtatctcggtgttgaaagacatcctttgggaagaactgaacaaggaaagcaataagatagaggacatcgttcaccgtccgaaagacgtgacccgtctgcaacaggaactcaaagacatgggcgaagatgaagacatcgtttatgaatatgaggaagatgtcgacgatgacgatgatatcgattatgaatacgaggaagaagattgggaagaaaaatgatttcacttacaaaacgcaaagagttgaaggggtataagtcactcaaggcatatcctgaagtcgctcatttcgtgactacacgtcacggaggtattagttccggggcttacgcctcattcaattgctcgccttatacgaacgactcgtctatgaatcttattcgtaaccgacattggttgtttcaattgatgaagtgggaaatacaagaattattcatagccgagcagcgacatggtgccgcaagtatggtgattgataaatggtactttgatacttcggaaggaataagacaggatcttttgataggtattgatgctttgataaccaatgtaccgggatattgcgtttgcgttacaactgcggattgcgtacctgtattgttgtacgacaagaagttgcaagtggtggctgccattcatgccggatggaaaggaacagtgaagcatattgtcagcaatgtgctggagcatatgaatcagaagttcggaacgcagggcgaagatgtgatagcttgtatcggtccgagcatttcactcgcatcatttgaagtgggtgatgaggtgtacgaagcttttaaagaaagtggcttcgatatgtctcttatttctgttaaaaagagaaaaaccggaaagtatcatattgatttgtgggaagcaaatcggattgaattactgaatgccggagtgcctgcagagcagatagaagtggctggaatttgttcctatattcatcatgatgaattcttctccgcacgtagactgggcatagattccggtcgtacattgtcgggaataatgattagaaaagaaagtaataattagcgtccataatagagcagggcactgatgattggtttatgattagttatgtttgaaataaaagtatctaaagaaataaaagacacatgcccggtttttgccggagctgctgtgtacgctgcggtgaagaatacagcttacagcgaaggtctttggcaggaaatcaacgcttttactgagcaactgacttccactacgcagatggaagacatcaaacgtcaacctgttatctttgctacccgtgaggcttataaacgttgtggcaaagaccccgggcgttaccgtccgtcagccgaagctctacgccgccgcctgatgcgtggaattcctttatatcagattgatacgttggtagaccttattaatttagtgtctcttcgtacgggacattcgatcggtggttttgacgcggacaaaatacaaggtacgcatcttgaactcggtatcggcaaagcaggagaaccgtttgaaggtatcggacgcggtgtattgaatatcgaaggattacctgtatatcgtgattctttcggcggaatcggaaccccgacaagcgatcatgaacgtacgaaaatggatctcggaactactcatatcctagctatagtcaacggttataacggaaaagaaggtttgcaagaagctgttgaaatgatacagaccttattaagaaactatacagaatcggatggaggcgaaatcgtattcttcgaataattagaatgagtgctctaagaaaaaagacatgaaaaacatacttatcttactgacagttttattattgccactgactgccgacgggcaggataaaccttccttctctgcccgcgaaatggctgatgtacgggtagctactcccggattatttgctaaaagcaatcatatctatctgcatttggattctctgaaagatcacgaatatgctttcccgttacccggaggaaaagtaatctctgcctatggaactcgtggaggacattcgggaacagacattaagacttgtgcaaaagatacgattcgtgctgcttttgatggagtggtgcgtatgtcgaaaccctattatgcctacggaaatatcgttgtaatccgtcacgctaacggattagaaacactttatagccacaatttcaagaatctggttaaaactggtgatgttgtaaaagccggacaacctatcgggctgacaggacgtaccggtcgtgccactaccgaacatgtacacttcgaaacccgtattaacgggcaacattttaatccgaatctcatttttgacttaaaagagagaacattgcggaaagaatgtatcaagtgtaccaagaacgggagtaaaatcgttgtgaagactcaaattcctgacaatcggattgctcaaaataaaaagtaaagggctatcagtagttgatgaatagccgggagattatgacaaattatggcacaaattttatgcagaccggcttgtctacttttatatcctgctgtacatctgttaatagtcctgtatctgtatctctttcataaacttgtatcacattgctgtctctgcaagcaaccaacaagtatttgccattaggcgtgatgatgaaattgcgtggatgaatccctgtcagttggtagcctgcttttgacaacattccgttatccgggtggatattgaatatggcaataccatctgctttcaaacgattgctggcatacaggaattttccatccgggctgatatgaatatcggcgcttccttgtgcgtttaccgtatcggcagcgattgtctggatctcttttaaatctccgtctttatattcaaaagcgattactgtgcccgataactcattaatcaaataggcgtaatgaccgtttggcgagaaagtcagatggcggggcccgaaccggctttcactttaaaggcagcaggcgatccttctttcagaaatgcttctttattctctgcatttgcagctgggttaatgataaacttatgtatttgatctgtacccaagtcatcggcaaacaagtatttaccatccggagtgatacggacacaatgcaaatgcggtttctcttgtcgttccttgtctactcccgtacctttgaattgtataatatcggaagcgggtaggagcgagccatcttttgcgatagggaaaacggagatgctgccgccactgtagttggcggttatcacattatttccactggcgatgatataacagggatcttcacctcccgtttgctgtgaatttaatagttgcaaagttcctttttctttattgaaggcaaatgcattggcggcagcttgtgtattattgaattcactgactgcatagacgaatttcccgtcggcagatggaacaagataagaaggattttcaacttccgtgtcacttaacggagtggcagtcccgtcttcttcgttgaagcggtagctatatatccctttactggttcctgatgtgtaagtacccaccaacatggttagttcgttttccgttgtatcggttgtttccataggagtcttttttttagaagtacagccactgatactgattccgaatatgcaaatagcggcaaatgctttgaatatagatgttttagatagatatgtcttaatcataagtagcttattattggttgatttttcatgatgctttttcaccttaaatataaaatagctccgtaaagatagtgctttgatataatatttgctaacgtcttctcgtaaattagaaaacatttcctatctttgcactcttggaaagcgttctaaacaatcgctattctgtacgaataaaaatttgggcttgactggatttgacagcgggcagaaatggtaggtaagcatgcagtgggtcggtaatttccacttaaatatcagttatcaaaattttatctggcgaaactaattacgctcttgctgcttaatcgaatcacagtagattagcttaatccaggcactaggtgccaggacgagacatcactcggaagctgttgctccgaagcattccggttcagtggtgcagttacatcggggatagtcaaaggcggcctcgcacttttgatgaaactttagaggataaggcaggaattgatggctttggttctgttcctgcacgaaaatttaggcaaagataagcatgtagaaagcttatgatttcctcgtttggacgagggttcgattccctccaggtccacaataaatgctgattttaagtaatttatgagatttgcaccccgctttacattattagaatgtaaagcggggtgtttttgttttatttaatatttctattttctgtgatattcatctgttcgtcaatgctcgggtcgaatcggtcgttgtataggtggcagacggcttaaatgtcaagactgtccaaacgggactgatcggattacttttcgtctttcttgttatcgagtagctgtgataattcttcctccacttcctcgatacttggcaaggcggatttcagattttcgggaatagctttgcttagctggtagtcgcttactcctatgggctgtgcatagcccgttagggcatattgtgccactacttcatctttacctttgcagagcaacaatcctattgtcttgttgtcgttttcacctctcaactggtcgtctacgatgttgatgtagaaattcaattgccctgcatattctggcttgaatggagtagcctttaattctacgactatataggcgtggagttttatggagtataggataaggtctgcataaaaatcgctgtccccgacttggaaatgtttctgtttggctacaaaggcgaagccgttccccatttccaatagataccttgtgacgtgttctacaagctgtttttcaatatccctttcatctgccagttcttttgtacctgctacatcgaatatatacgggtctttcagcaaatagttggctaagtcactttgaggggtgggcaaggtctttgtgaaattgttgactttctgtgtttctatctgccgtttgaacagattagtctcaatctgtatctttaatacgttgctgctccatccgttttcaacggactgtttcatgtaccaatatttgtttcctaagggtaatgagctatccaatagtatcacatgactggtccagtttatttttgaaatgggggaacaaacaaaatccttttcaatatcatcaatggatgtttgcagcattgcggagattgtcttgtctatcttttgaatttgcgcaagaggctcttgcgtaaattcttttgattgaaatatatttgtctgaaattgcgcaagaggttcttgcgtaattggtaaacagttcagttcatcagtcaaggatagcatattggggattgttggcgttctcaacaccttgtcacaagaaagcattctttgtaatatctctagtgggtatgttcgggcaaactgacacatataggtaaggcttctcgctgaatatcctttcttttcgggatagtgcatcttgatagcctttgaaatctgacttatggcttttggatagcctctttttattatggagtcataactgaagcactcccacttcgcgaaccatttatttttatatccgtatcaggcaataatcttttaatacgctctatttcctctttagtaatctttccatataaactcaacgatccgatttttatttttgatatttcgtccggtatatcaattgtatcgataaattggatatccaacctttttatttctttgagctccaacagtacagccggaaattcttttactctgatattgatgccgcttccccagccatccttttgagcatcagcacttaatttactttttaatccttccttgttaacatctttcttcccgaccatccaaccaatttgcggtcgcagagcaaaagtcttgctgttttgttctaacccgatgaaacctgcccaaaattctaatggagtttctttgacagcgtcgccatatactgcctgatactttacgtctaccttcactatctcatcagggagacaattcctgccttccagctgtttcagattatttcttttcccttccttatcgtaagggaaaaacttcacgatccatccatcaataatgtttggggctccgtatcgtttctgtgaatgatatttaaacatgttgcgccaaaagtccttattgacttctcctttagatgctttgacaaattcttccaaaagaggttccagttctgaaatccaccaatcgagtttgtattctttcaaccctctggctttgtgcagtagtttttcccagtcctccggtgttccttcgagagttatttcaggtattccacagacaatgtgtatgatgataaactcaaagtaaggttttacagcctccatgattgttatttcggaagcaactttctctaaagaggtagtcgttgaaaaattgcaggtgagcagttcggtcagatgcttaccggcgtattgggatatttgttctgtaaattgcggaaagattttctcccacgaaagagtagggtcttccaattttttgtcttctcttacaattaaggatagtttgccggagaaatcaacaagttcatttctcatagattcctgattggcattgatatggcgtgcaaatccctggctgattaatagccaaatcatgtccggagacaatacgaatggcctgtgatctgcataagcctgatacataccattgaaaaaagaattagggccaaaagaaacgagactgtcgggagattcgctctttgcaatgatatgataaggaaccttgatattcttctcttctatctcataaggctctatgtccatatctgataatataagactttcgtaaatttcattcggggagtgtagatgaagtaattcttcaggctttgaaagcttttcgaccttaaaagtgattccattttgagcgaatgtggaaacactgcaaaatatgaataagcaaaataatgtgtttttcataatcttaaagagttgtatggtggcacaaacttattaactacctctatattttgaatagacgatatgcaaatataatataataagaactgtctttgacaagatattgaatgtttttttgacttatatctataaaaatcataagcatattatttcttgaaccgataagcaggatttattcgggaatttatagtaagtttgctctgctaatcctaaacaatgacgcagagaaagattatacatatcgacatggatgccttctatgcctctgtagaacagcgtgataatccagaacttcgtggcaagcctttagcggtaggtcatgcagaagagaggggagtcgtggctgctgctagctatgaagcccggcgttacggtgtccgttccgctatggcttcgcaaaaggcgaaacgtctttgtccccaactcatttttgtacctggcaggatggatgtttataaatccgtttcccgtcagatacatgagattttccacgaatatacggatattatcgaacctctgtctctggatgaagcttttctggatgtcacagaaaataaaaaagatatttccctggctgtggatatagcaaaggaaataaagcagaagattcgggagcagctcaaccttgttgcgtctgccggagtttcttataataagtttctggctaaaatagcttcggactatcgcaaaccggatggcttatgtaccattcatccggaacaagcccttgattttatagcccgtcttcctatcgaatctttttggggagtgggtccggtgactgcaaagaagatgcatctacttggcatccacaatggacttcaactacggaaatgctctcttgaaatgctgacagcccatttcggaaaagccggtgtactgtattatgagtgttcacgaggaattgacgaacgccctgtcgaagcaattcgtatccgtaaatccattggctgcgaacgtacattggaacgtgatatttcagcccgttcatcggtcattatcgaactataccatgtggcagtagagctgattgaacgtcttcagcgaaaagacttcaaaggtaacacgcttactctgaaaatcaagtttcatgattttagccagacaacccgaagccttactcaatcgcaggaactcaccaccttagaccgggtactcccacttgcaaaagaattgcttaaaagtgtcgaatttgagcaacatccaatccggctcatcggtctttccgtctccaatccaaaagaggaagccgatgaacaacacggtgtctgggaacagttgagttttgaatttagtgattgggattgaaggcgaagaggaagaaatagagggatgaagaagaaagaatagaggtgtgaaaaagaagagaattaaagaatgaaaaaagaaagaggatagaatatccaaacagatactttgtctgaagtaaaacagatactttatttgaaataaaatagagcctttatttgacctaaacagagcctctgtctggaataaatagaacctctattttctccaaaggaaacctctgttttctaaaactgcatctttgtttttccgaaatgaaaacccagtttccgtgtgacttaaattgtttctacaatgacttaatttgttcttataatgacttaaaagcctaaaatatagcaattaagagtactatttttgaagtatgtacttttttgtcatcaggttcgtatgatttactcacctcattttttatcagatacgttatctttgcaatacttaaatgaataaaataccatgaatcaaatgaaacatttattttgtgttcttctactagcagctttgggaagtttttctttcaaggcaaacgcttacaccgaacgcaatatgctgcaaaaagcggcagacgaaactacgttgaaaaacgtgttggtaatgaaacaagcttgggtgccttatcctgcttatacagatcgtgccgcctgggattctttgatgggccccaataagcaacgcctcatcgaagccggcgaaaaactcctcgactataaatggcaactgatacctgccaccgcttatctggaatacgaacgcagcggtaaccgtaaaataatggaagtcccttatgacgccaaccgtcaggcacttaacgccttgatgctcgccgaactggccgaagggaaagggcgttttatcgaccaattactgaacggagcatatatgagctgcgaaatgaattcatgggttctatccgcacacttgccccgtcagagcagcaaacgttcacttcccgacttccgcgaacagattatcgacctcggttcaggcggatacggagctttaatggcttgggtacactatttcttccgcaaaccattcgacaaaattaatcctgtggtatccttgcaaatgcgtaaagcaatcaaagaacgtattctcgatccgtatatgaacgacgacgaaatgtggtggatggcttttaactggaaaccgggagaaatcatcaacaactggaatccctggtgtaactccaatgccctgcaatgtttcttactgatggagaacaataaggataagttggcgaaagctgtttatcgctccatgcagtcagtcgataagtttatcaacttcgtgaaatccgatggtgcctgtgaggagggaacctcttactggggacatgccgccggaaagctctatgactatttgcagatactctctgatggcacaggcggtaaactgtctctgttcaatgaaccgatgattcgccggatgggagaatatatgtcccgctcatacgtgggcaatggctgggtggtgaattttgctgatgcatcggcacaaggcgggggcgatcctttgttaatctatcgcttcggtaaagctgtaaacagcgatgaaatgatgcattttgccgcatacctgttgaaaggaagaaaaccgtatgctaccatgggcaacgacgcttttcgttcgcttcaatctctactttgctgtaatgagctggcaaaagcaactccgaaacatgatatgccggatgtaacctggtatcccgaaacggaattctgttatatgaagaataagaacggtatgtttgttgccgctaaaggcggatttaataacgaaagccataaccacaacgatgtaggaaccttttctttatatgtaaatacaattcctgtgataattgatgccggtgtaggtacatataccaaacagacgttcggcaaggaccgctataccatctggaccatgcagagcaactatcataacttgccgatgattaacggagtaccgcagaaattcgggcaggagtataaagctaccaataccgtttgcaatgagaagaaacggatgttctctacggatatagctactgcttatccggcagaagcgaaagtgaaaagctgggttcgctcttatgctcttgatgataaaaaacttattattggtgatatttatacgttggatgaggctattgctcctaatcaaatgaactttttaacttggggcaatgtgactttcccgtcagccggaaaaatccgcatcgaagtaaagggacaaaaggtagaaatgaactatccgtcgcagtttaaagccgaactggaaacaatcaaactggatgatccgcgcctgtctaacgtatggggcaaagagatttaccgcatcacactaaagactgaagaaaagaaagtgactggtaaatatggatttgttattcaacaagtgaagtagggtgaaatagatttttaaagctagaaaaaataaagtataaacaattaaatcacagtaagatgaaaaaagtattatttgccgggcttttggtccttgcaggagtaagcgtaagtgcgcagaacctgataaaaaacgaaaaattcgccactgaagtaaagactaaagtgactaatgccaacaaagctaccgcaggagagtggtttatcatgaataatgaagctgacggtgtaactactattgcttgggaagaaacaggagatgccaaatattcgaatgcaatgaaattggataactccggtgctgaaaagaatctctcttggtataaagctttcctgggacaacgtattaccgatggtttggacaaaggtatctatgttcttactttctatgcaaaagctaaagaagcaggaactccggtcagtgtatacatcaaacagaccaatgaggaaaagaatgataatggtaagtacaatactactttcttcatgcgtagagactatgacgcagatgctcaaccaaatgcttcgggcgcacaatacaattttaaaattaaagatgccggtaaatggactaaagtagtggtttactatgatatgggacaagtggtaaatgctattagcagcaagaaagcaaatgctaacttggaagtgtctgatacagacgatgatgctgctattctgaaagattgttatgtggctattctttcccagaataaaggcggcgttgtagaaatcagcgacgtgacattgaaaaagaaataaagagcaaaggatttaatatagtaggttaacaaaaaaatagggcagtgaagtagtgatacttcgttgccctattttttttgttatatgaatataatggagagttccgaataaataaatgtatgaaacagtcaatctcccttcgggactgatttcatgcgatttattgaataccgagtttcttcttcagttccttaggcagagaatctttgtgtaccatcacgcagattgttttagcacgtacatagctttcagacatattcagataacctccggatttgttgctttccgctccccaggaattcttggtgatataatatttagtaccattctgatcttttacaatgccggtgatgtgcatcaagtggtcgtcagttgtcacaaacttctcgtaaccatcctgacggatttccggtgttacgttgatttccggataaggatgctcaaacttgaacacttcgtccattcgttgatattttggcattttctcaaaacgggcacggtcggtagtcaagtaatctttcacatcctccacttgcggattgatggcgattccgttcttgaaagagaaaccctgttcgcttacgtcaccgtcccaacatacggtatatcctttgttcagtgcatagtcgatagcctcgatcagttcgtccaacggaagattatacattggctggttttcccagttgtcgggaacttcaggtgagaatgtctcataataaggcttgtgagtgaaactagtcaactcaacgtaatcatccatattcaatcccagactttctgtgaaagattgaggagtatattcttttcctttataagtgaatttttcaggaagcttgcctagataaatatcaaacagattattaataagcgcatcaaattgcggagtgcgctttttagattcaatatttgcgtctaccaatgctttgaggtagcgtgacaatgcaccgtgattgtggtctttgttatcgcctagcaatccggtgtacacttcttccggaacgattcccgctttcttataagcgtttttgaaagtgtgtgccaaacttccttcaccgatacttcctttaccacgacggagataattgtcctccatctgattcatgtacttttggcgaacgataaacatttccgagagatcatattctccttttcccattcggagcagttccgactccatgaaagaagcggtggcaaagcaccagcaggttcctgtggaaccctgatctttaacaggcgttgcttggtgagatacaacggttgtgaactcataaccgggtgtttgtgcaaaagaggttacgaccaataagaggagcgcaaccgacataaatagctttttcataatgtgttttattatctttcttctgcaaatgtataaaaaaagcgaagatactcgaaagttcctcgctctatttattataattagtgtgtttatttacatggcaacctgctgtgacagcagtttttgaagtttaccgtttaatgtttggcacatggcaccatttcccattgcttgatagcgtttaatacggtactgtaacatcataattttttcatttgcattctttttcataatttgtttcctctttttttgccctccacgttttgaagagcggttttacatcttgttttctctaataacactgcaaagatacaaattgttttcgaattatatgctgtaaaacataaaaatcttcttttccttttgaattttctttttataagggttcgaacacggtctatattacaaacctgttacaaaattcccggattttcccatcaatgacaatattattcttatctatcacatttttatgtacttatctaggtattcagaaaatattcttctatttttgtcagtcagcaaccttattaatagaataaaccaaacacttatatgaaaacattcacccatcttttgtgcgtcctgattttgtcgattgtactgtttgcttgtaacaatgctcacttcctcaaagaagaatcctaccggaatcaagtagctcaagactttgagcagaaaaaacaggcacttcctcatggagatttatttgcgatctttgccgattctattttgtcagtctacgagcgcgaagcattgatgtttctctacgcttatatgccgataggggacgtgacggattatccgggagattattacttggagaatgtccggctgtcgaagcagacacgtgacgagatgccttggggtaaagagattcccgatgaagtgttccgtcattttgttctgccgctccgggtgaataacgagaatttggatgattcccgtcgtgtgttttatggtgaactaaaagacagggtgaagggactgccgatgaaagacgcgatattggaagtgaaccactggtgtcacgagaaagtggtctatcgtccgagtgatgcgcgcaccagctcaccattggcatctgtcaaaacagcgtatggacgttgtggcgaagagtctacatttacggtggctgcgctccgggcagtcggtattccggcacggcaagtgtatacgccccgctgggcgcatacggatgacaatcatgcttgggtggaagcatgggcggatggacattggtacttctttggagcttgtgaaccggaaccggttttgaacctgggatggtttaattcccctgccagtcggggaatgttgatgcatactaaggttttcggacgttacaacggtccggaagagattatgcttgagacaccgaattatacggaaatcaatgtgattgataattatgcccctactgctaaagctatcgtaacggtgacggatgccgaaggtcaaccagtagcagatgccaaagtcgaatttaagatatacaattatgcggagttctatacagtagccacgaaatatacagatgcagaggggaaagccagcctgactgccggtaaaggagatatgttggtttgggcatcccgcaacggacaatttggttatgccaaaatctcatttggaaaagatgatgcattgcaactctctttaaataggaaagaaggtgaagcctattccttgccaatggatcttgtacctccggtggaaggagcgaatattcccgaagacactcccgaacaacgggcggaaaatgatcggcggatggcgcaggaagattcaatccgcaatgcgtatgtagcaacaatgatgacggaaaaacaggccaaagagtggatagataaactatatggaaataccttacaatcggaaaagaaagaaaaattagtaaacttcctggttgcttcgcgaggaaaccaccaaaccttgaaagacttcctttcgcctatccgaaaagagaaagacgctgtttcatgggaagaaatacgggctatatggatattagagagtctttcggctaaagatctccgcgatgtaactctagatgtattgaatgatcatctgctgactaatatctcggattgggagaagatagagactgatttatttaaaagaatgtacctcaatcctcctcgtatagctaatgagatgttgactccttataaaaaggaacttcgtgaagccattgaaaaaacagtgtaccagtctgtgcccgatagcatgaaacgtgatcccaaagtattaatagaatggtgcagaaaagagattaaaatcaataatgaactgaattctcaacagattcctatctctccgatgggagtatggaaagcacgggtggctgatgaaaagtcgcgtgacatattctttgtggcagcttaccggagcatgggatgggcgtccgctgcctggattgatgaagtgaccggaaaggtgcagattctaaatgaagaatttgcaaaggaagatgtcaacttcgatacggcagaagctgcacagtctcgaaagggagtattgcaagctacttatactcctatccgctctgtggaagatcctaaatattattcgcatttcactctttccaagtttaaaaacggcacattccagttgcttaattatgacgaaggagagacggatatgggggatggaactacctggcgtaatttgttaaaatatgggagagagcttgatgaaggctattatatgatggtgaccggaactcggttggcaagtggcgcggtgctttccaacagtacattttttactatagaacccggtaagacaaccaccgttgaccttgtgatgcgtgaaagcaaagatcaggtgcaagtgatcggcaattttaattcggaagcgacctatcgtccggttgacaacactgaacagcggagtattctgcaaacctgtggacgtggctattttatagtagctgtgcttggagtagggcaggaacctaccaatcatgcgctaagagatatagccgctttgggcaatgacttcgaacaatgggggcgtaagatggtctttcttttcccttcggaagaacaatacaagaaatttaatgccgacgaatttaaaggacttccgtctaccatcacctacggtattgatgtcgatgacagcatccgcaaagaaatagtgcaggctatgaatttgaacaattctattctgccggtatttattattgcagatacatttaatagggtagtttttgtttctcaaggatatacaatcggtttgggtgagcaattgatgaaagttgtacatgggttatagaaaagaggaggtatacaataatcgttaattcttgcccttaatgcgttttttcggaaaagaatgattacgtttgcagcaaattatgactaagtacattttttgcatattagcatgtgcatttctggtattgggatttagtaatgtttccaataaagaattgcagggatttcagaaaaaaactgaaacctcgtctaatgacatgcgatatgaagcagtgtcatgctgttgcgtttcttctgccggcttcgacaagccaggtaaagattctcattcgcagtttgttgacgagacatccacttgtaatgttagtgactgcatttttgacaatatctcttttccgagaagcattgttcctttcaagaacctgaagttcaataccaatactgtcattatacagatattgagctctctgaatgttatgcttccggagaatcgtttggggcataccggccttgatgtcaattacactaaatattcgtgtaagtattacgtctatacattggcgcatattctcatttagactatattcttatctttgggtaaggtgaggtgcctattcagatcctccatctaccatcatttcctttatttattatcttagttttattcatgttaacatggaaaacaaagaatgtatttcctatgacttggaacaaaggacggatattgatgtgcttgtctttaaggattaaaatattgtgttcccgttgtgaaacgggagttacgtcgtataaaagcaaggatatttgaataagattatacaacctaattttttatattactatgattcatttattactatctactcttgcgatgatggggcttacgttcctcatcggtttttttgtcgctgcggtcattaagttgattgcctatgcggccgattcatttgatttttatagttcccaccgtttggagctactccgtttgcgacgctggcgtcagcatcggcaaaaggtggagagattagtccgacagattcccattgcagatgaagatgctttgggagatttccgtgaagattacagtaaggggatcgacagaaactttactggttattccggctattatcatggcgtgagtccgggagcttctgaaaataatctgatgaattattattattcacaggatacccgcgaattctttcttcgggaagaagagcaggcacatgtcaataagaagaactcaaagaaacttactaacaacaaacaataaaagaaaactaatttatggaaaatatagattttgctaccttgtttcaaggtattggtacaatgatggcaagcggatgggtgcttgcttctgcaagagtttttttagtacttctcggtttgttactgatctatttaggctggaaaggtatactcgaaccgatggtaatgattccgatgggattgggaatggtagctatcaactgcggaaccctcattatgcccgacggtacactgggtaatctctttctcgatccgatgctttcagatacggatcaattaatgaatactatgcagatagatttcctgcaacctgtttataccctgacgtttagtaacgggctgatagcttgttttgtctttatgggtatcgggacgcttctggatgtcggcttcctgcttcagaaaccatttgcaagtatattcctggctttgtgcgcagagctgggcacttttctgacagtacctattgcttctgctcttggtctgactctgaaagaaagtgcatctgtggctatggtgggtggagccgacggaccaatggtgttgtttacttcgttggcattggcaaagcatctctttgtccctattacggtggttgcctatctttatttgggcttaacgtatggaggctatccatacttggtaaaactgttggttcccaaacgcttccgcgctattaagatggtgacaaagaaagctccgaagaattacgatgctaaagtgaaactggctttctctgctgttctttgtgctattctctgtttcttgttcccggtagcttctcctttgttcttctctttgtttctgggtgttgctgttcgtgagtcgggtatgaaacatatctatgattttgtgagtggtccgttgctttatggctccacttttatgttgggtgtcctgctgggtgtactttgtgatgcacatctgttgctcgatccgaagattttgaaactattagtattaggtattgtagcattattactttccggtattggaggaataatcggaggatatatcatgtatattattaaacggggtaattacaatccggtaatcggtattgcagctgttagctgtgtacccactaccgcgaaggttgcacaaaagattgtaagcaaagataatccggactcatttgttctgggagatgccttgggagctaatatctcgggagtaattacttcggctattattactggtatttatattacgataattccatatttataaataaaagtataacagtttcttgagatactgttggtaatgatgcaaaaaaagaaatggtgaacaaaaggcttgaaggctgtatgttcaccatttctgtcttgtattagtactattatgagacgatatctcatcccttgctgccatatttatccatgtaaagcggcatcaatcgtttcttttactcttcgtatggaagttacgtttcgttcgtattcgttgatgtgtaccgtgcctcccatggagacggcttcatttttgaatatcatttcgctctgaatactttcacgtgccgagaaatgaaactcgttgattccggtttctgcggcaatgcgtgcgatattattttcatttactccgcatccggcgagtaatgtgattcttccggcagcctgtttctgtaactcttctaaaagggggattcccagttcagccgtaggttgttggccggaagtcagaatacggttacatcccagtttgatgatctgttccaatgctctctgcgggttatggcatacatcaaatgcccggtgaaaagtcacagatagcccttgagccgcttccattagtttctgcattactggcaagtctacttcaccctctgctgtcagacaaccgaataccactccgtctgcccctaattttcgtgcaatttcaatatctttcagcattgtccggatttcgatatccgaatacagaaaatctcctccacgaggccggataataacgtgcaggcgggtatgagtcagtacttcccttgcgatggcgatctcaccataggagggcgttgttccaccttccggtattccggcacacagttccacacggtctgcaccacctttctgtgcggccaggcaactttccactgaattggtacaaatctcaaattgatattttcccatagtcgtgtattaaaaaagggcgaatttcttcgcccttatatgaattttcttttgaatcgttacgttatttagcgaaacttaccgcacgtgtttcacggatgacggtaatcttcacttgtcccggataagtcatttcatcctggatcttcttggcgatttcacctgacaggctttctgtctgcttgtcgtcaatcttatctgcaccaacgataacgcggagttcgcgtcctgcctggatagcatacgtctttgttacacccggataagccattgctaactgttcgagatcgttcagacgcttgatataagcctctacgatttcgcggcgtgcccccggacgtgcaccggagatggcgtcacaaacctgtacgataggagccaggagactggtcatttctgtttcgtcatggtgagcaccgatagcgttgcagatatccggtttttctttgtatttctcagcaagtttcatacccagcaatgcgtgtggcaattccggttcttcatcaggcactttaccaatatcatgcagcaaacctgcacgttttgctttcttcgggttcagtcccagttccgatgccatcacagcacaaagattggctgtttcgcgggcatgctgcaacaagttctgaccgtatgaagaacgatatttcatcttaccgatgatacggatcaattcaggatgcagaccgtggatacccaagtcgatggtagtacgtttaccggtttcgataatttcttcttccacctgtttgcgtactttagctaccacttcctcaatacgggccggatggatacgtccgtcagtcacaagctgatgcagggccaaacgggcaatttcacggcgaaccgggtcgaaggcagaaagaacaattgcttccggggtatcgtctacaacgatttcaacaccggtagcagcttccagagcacggatattacgtccttcacgtccgataatacgtcctttgatttcatccgattcgatatggaatactgtaacagagttttcaatggcagtttccgtagccacccgttggatagactggataacgatacgtttagcttctttgctggcagttaatttagcatcatccataatgtcgttgatgaatgattgtgcctgcgttttagcttcttccttcagtgattctaccaggcgttctttggcttcttcggcagacaatccggagattgcttccagtttatcgatttcctgctgttgcagtttatcgagttcttcttttttcttgtcaacaatcacaagttgcgcttccaggttctcttttaccgcttcggcttccatctttttacgttggatttcttcctgacgctggctaagtaccatttcacgttgcttcaacttgttttccgcttgctgaatcttctgattccgcaatgctacctccttttcaaggtccgctttcttattcaggaatttctccttcacttccagcagcttgtttttcttaattacttccgcttccgtctccgcttctttcaggacattatcgtatttggatttcagtacataccggaatagtatatatgaaaggactcctcctacgatgaagcaagcaattgctgttgctattattgctatcattctacatttaatttaagtatataaataaaaacgcaccgccaaatatcaaagcaattatttttgcttggatattgtgcagtgcgtggttgttttatctcttatcagcgaatagccggtcggggatttattcttccttaaaataatcctccagcaattctgtcagttcttttaccttctccacataggggctggtatcattacgttgcatcaattgcagtctctctaacgagaactgataggctaccatggcaataattttttcgggttccagatttttatagacttcccgatacttattaagcctgatatttacctgcttggcggcttcccgtaccatttgttcttcctcacggttgatggttaacgggtagtttgagtctgctatctgcaggtttatctttattttatcgttcatacatcttcttcttattcattcaacaaagcgatgcatttatcgacttcacgcactaattttgacaatcgcagcttcgtctcttttacgtcgctgccgttaaggctgattgccgtagctgtttttaggtttgtatagctgacttccaattcatcgtattgagcttgtaccttctcgtttttcagcttttcattttcgagaagcttcttcaactcggcattttcacgcttaagttcatcgtgcaaataaatcaaatgccgtagttgcgtttcaaaggaattcaataactttttttcttcttctgtcatcactacaccaaaattgtacacaaaaatacgattaactctgatattacaaaaacttttcgggagaaaatgttctttttcgtctaaattagctatgaacggaggggaaagtagagtattgcataggaagcaaatacagactgcttataatattatggtatattttaaattaatgcgaattagtaattgaaaatgaattgtcattcatttttgtacgattctgaatcattacaaaatcgattaaatttttctactgggtatttattttcaatctttctatttcttctttcaccttttctctgtctcttcgatgaataaggagtttgcgggtgaagagtaacaatttcaccatctcttcacctgtagcgagtagtttcaaaaatagtttcaaggcttgaaacaatctgtttcacaccgagaaacacttcgtttcgctacttgaaacaaagtgtttcccgccttgaaacttttagtttcaaacaaggttgaaactaattacgaaatagctttactaattttactcaatggtggaatctggaggctgcaagtaagcgtctccgcgattctatattgctgtccgtttttagctctcatatctttgcgaggtataaaaatgaagcattatggatttagaaaatagatttagaagaacttggaaacgtttccaagaagtcttaaaaacagactacaattgttctttagcggatgtttgccgcgagcagcataccacttttggaggtatgagttcctggatgtcccgacggggctatagcgttaaacaagctaaggcagatgtggttcgtgattattatggcggcgttgagccgtccccactgagcactacctctcctgcgttcactcaaatagcacccgccatgtcgtcggaagaagagtttagtcttgccgggatcacaatcacgtttaacagtggaaccaccatttcggtcaaacgggccacacccggtggtgttattaaaatgttgctcgattacgaaagaaaggagggagatccatgtattctctaacatcagccaatcgatactatctgtaccagggctttgttcgtatgaaccttggcatcgacggtttattcaaaattatacgcttggaaatgaaggacttgtctcccgtttccggagatatatttttattctttggcaaaaaccgacaaagtgtaaaaatactgcgttgggatggcgatggctttcttctgtactacaagcgcctcgagggtggaagttttgagttaccaacatttaacccccatacaggcaattacgagatttcttatcaggttttgtcttttatcttaaatggagtgtcattgaagtctgtacggttgcgaaaacgtttcaggatttaatataacatcttgattgttaattatttgtactaagtatatcatccgatttatttggtcaactcgttgattttttatatctttataccatgaaaaaggatgagatcatagagttattgaaggaacagatcaagagattacgagatgacaacaacagactcttggggcaagtagatgctttgataaaagaggtttcttcccttaaagaagcactccttcaaaaaggcgaatctcttagcaaacaacagcgccttgctaaggggctcgccaaacttgtatccaacacatccgaacagcaacaagctccccaacctgccatgtccgaagaagagcggcagaagagagaagctgaaaaagcagataagcgtaaagccagaaagaacaatggtgccaaacgtgacatgcattatgagatggaggaagaagaacatgtcgtttatcctgatgatcccgattttgtaagcgtctccgcgattctatcttgtcgcccttttttcattcttatatttttgcgatgtataaaaatgaagcattatggatttagcagaaaatcgatttggaaaaacttggaaacatttccttgaagtattgaaagtagactacaattgttctttagccgatgtttgccgcgatcagcataccacttttggtggtatgagttcctggatgtccagacggggctatagcgttaaacaagccaaggcagatgtggtccgtgattattatggcggcgttgaaccctcccaaccgacaacttcctctccttcattcactcaaatagcacccgccatgttgtcggaagaagagtttagtcttgccgggatcacaatcacctttaacagtggaaccaccatttcagtcaaacgggccacacccggtggtgtgattaaaatgttgcgcgattacgaaagaaaggagggagatccatgtattctctaacatcagccaatcgatactatctgtaccagggctttgttcgtatgaaccttggcattgacggtttattcaaaattatacgatcggaaatgaaggacttgtctcccgtttccggagatatctttttattctttggtaaaaaccgacaaagtgtaaaaatactgcgttgggatggcgatggctttcttctgtactacaagcgcctcgaaggtggaagttttgagttaccgacatttaaccccaatacaggcaattacgagatttcttatcaggttttgtcttttatcttaaatggagtgtcattaaagtctgtacggttgagaaaacgttttaggatctaattcaacattctgattattagacatttgcaataaagatatcatccggtttatttggctaattcgttgattttttatatctttatgccatgaaaaaggatgagatcatagagttattgaaggaacaaatcaagggattacgagatgacaacaacagactcttggaccaaatagatgctttgataaaggaggtttcttcccttaaagaggcactccttcaaaaaggcgaatctcttagcaagcaacagcgccttactaagggactcgccaaacttgtatccaacacatccgaacagcaacaggctccccaatctgccatatccgaagaagagcggcagaagatagaagcggaaaaagcagataagcgtaaagcaagaaagaacaatggggccaaacgtgacatgcattatgagatggaggaagaagaacatgtcgtttatcccgatgatcccgattttgacatcaataaggcccggttgtttaccactgttcccagaatatgcgtccgctatgaatgtgtacccatgcgcttcatcaagcatgtctacaagatacacacctatacacaagaaggtcgcctgtttgagggaaaaacaccggcctcggccttcttgaattccagctatgacggttcatttattgccggattgatggaattacgttatatacaatcgctacctgttgaaagaatcatcaactacttcgagagtcatggctttacgctgaagaaacctacggctcataagttgatagagaaagcctcaaacctcttcgaaaatctttataagtgcatccggcagacagctttgagtgatccttataaggcagccgatgaaacctattacaaaatactcgtcccggaaaagaacagcaagggaaaaggagtcaggaagggatacctttgggtggttgtcggcataaacaccaggatgatatacttgctctatgatgacggctcccggtctgaaagagttattcttaacgaattaggcagttgcaaaggtatcatacaaagtgatggttactcaccttaccggaagctcgaaagcgatgcttatcccaatatcacacgcatcccgtgcttgcaacatataaaacggaaatttatagattgcggtgagaaggacccggatgcaaaaaggatcgtggagctgataaacgcactttatcaaaacgagcataagcataaagttggggttgagggatggacggtagaacagaatcttatgcatcgaaaaaaatatgcgccggacatactcggagaaataaaagatgtgtttgatgaaatagaagaacggggggatttattacctaagagcgaactgcaggaagccattacctatcttcgcaatgagtggaatgcagtggtggacatctttaattatggtgacacttatctggacaacaatatggttgaacggatgaaccggtacatatccttatcaagaaaaaactcattgttcttcggcagccataagggggccgaacgaggcgccatactctatacgatagcactcacttgtaggatgcataaagtgaatctatttgagtatctcacggatgtgataaacagaacagccgaatggcaaccgaacacaccaattgaaaaatacagggaactgcttcctgacagatgggaaaaggctaatgactaaaaagggatcattagcctttttattttaatacactatatagaatcgcggagacgcttacccgattttgacatcaataaagcccggttgtttactaccgctcccagaatatgcgtccgctatgaatgtgtacccatgcgcttcatcaagcacgtctacaagatacacacctatacgcaagacggtcgcctgtttgagggaaaaaccccggtctcggctttcttaaattccagctatgacggctcatttattgccggattgatggaattacgttatatacaatcgctacctgttgaaagaatcatcaactacttcgaaggtcatggctttacgctgaagaaacctacggctcataagttgatagaaaaagcctcaggcctcttcgaaaatctttataagtgtatccggcagacagctttgagtgatccttataaggcagccgacgaaacctattacaaaatactcgtcccggaaaagaacagtaagggaaaaggagttagaaagggatacctttgggtggttgtcggcataaacaccaggatgatatacctgctctatgatgacggctcccggtctgaaagagttattcttaacgaattaggcagttgcaaaggtatcatacaaagcgatggctactcaccttaccggaagctcgaaagcgatgcttatcccaatatcacacgcatcccgtgcttgcaacatataaaacggaaatttatagattgcggtgagaatgacccggatgcaaaaagaatcgtggagctgataaacactctttatcaaaacgagcataagcataaagttggggttgatggatggacagtagaacagaatcttatgcatcgaaaaaagtatgcgccggacatactcggagaaataaaagatgtgtttgatgaaatagaagagcggggggatttattaccaaagagcgaactacaagaagctatcacctatcttcgcaatgagtggaatgcagtggtggacatctttaattatggtgacacttacctggacaacaatatagttgaacggatgaaccggtacatatccttatcaagaaaaaactcattgttcttcggcagccataagggagccgaacgaggcgccatactctacacgatagcactcacctgtaggatgcataaagtgaatctatttgagtatctcacggatgtgataaacagaacagctgaatggcaaccaaacacaccacttgaaaaatacagggaactgcttcctgacagatgggaaaaggctaatggataaaaagggagcattagcctttttattttagcaaactatatagaatcgcggagacgcttacggctgcaatttgatttgattcacgatgaagagcaggtgaaggggcggctattcacctacaaactgcttgtttatcggccatacagaagaaaagtgaaggagctggaagaattggacgtattatagagaaagagcattgaatgattcaaaactatataaatctgaattcttcttttttgttggtatcgtaaaagattactattcagcaaacttttgtaacttcggtatgtttttcaggaaagtattaagatataatatctggtagataagtcattaatatacctccaaacgtggcgtcgatgcacgcattttgatttccgcatccaacacgattgaatgattgggagatgccggatctttgattttctctaaaataagttcggcagcttttttccccatctggtacaaaggcggttctactgtagtcaatttgggatagactatgttggaaagttcagttcctgaaaaactggctacggcgatttcttcgggtattttttttccaagttctctcaatctgttcatggctccaatagccaatgtttccgtaaaagcgaaaatagcattgaaaggaatatttctttccactaatatatccgctgcttttttcccttcctcaaaagtcataccggtttttatcagcatattattcttatcaaaaggaatcccgaatttagccaaagcgtctttgtatcctctgacacgttctatggagttgtaaatatcgtccggtccctgtatatgaacaatctgtttgcgtccgcttcggatcagactttctacgagaaagaatgacttcatataatcgtccactattacctgcggaacttcaagtccatagggaatacgatcatagaacaccataggcattcccgcttgctgcaaacgagcatattcctccttattccttttataactgcaaaggcagatgatgatgccatccaccatgaatccttccatcagttgcaggttctctttttctttttccggatctcctcccgactctgcaataatcacctttatatttttggtgtgaagcacttcttgtattccgtttattactcgtgaagcaaacggcgtaaccatttcaggaacgatcacccccacggtattggtatgtccgtatttaaggttgattgctacagggtttggtctatatcccaatcttttagctgcttctatcaccttttctttcgtttctttacggatattcttgtcatcccccaatgcacgagatacagtggagacggatattgataaatgtcgagcgatgtcttttatggttatatacttcatgctgaatgattgtttaaatcaaagcaaagatattgatttcaaacaataaatcctaatattggagtaaaatacgaatcccatttgcctttgtgtaatgcttttgtaacgtttgcagattttgggaacgttcccgcaatcgtttgcaggcaaaagagttaggaaaaaactttttttcaagctcttgttctttatctttgctacatcaacatgatgtcgaactaaagaaaaagaactatgaaaacacacctcttttcttataagtgcggtcgaaagcacatcaaagtttaccatctatttgaattggtaataattaaaggataaaaaacggtcatggacaagaaagtacgaagtatagaaatttcgaaacgggttccaattgtgggcaactatgatgtagttgtctgcggtggcggaccagctggtttcattgcggccattgcggctgctcgcagtggtgcgaaaactgctgttgtggaacaatatggttttttaggtggaatggcaacaatggggcttgttactcctttgagtgttttcacctataataatgaaaaggtgataggcggtattccatgggagtttatcgaacggctggagaagatgggaggctgtatcattgagaaacctcttggcaatgtagcttttgatccggagctttacaagcttttatgccagcaaatgatactggaagccggtgtggatatgtatatgcactcttacttaagcggttgtcaggcaaaagacggcaaaatatcctgtatcttctttgagaataagaatgggacagaggccataagtgccgatatgtatatcgactgcactggggatggtgaccttgccgctatggcgggtgttccgatgcaaactgatgaatgtaaaccgctgcaacctctttccacctattttatattaggaggtgtggatacagattcgcccatgataattgatgccatgcaccataataaacaagggcagaattgtcattgcattgcagttcgtgagaaacttctagcaatgaaagagaagcttggcatccccgagtttggaggtccttggttttgcaccactcttcgtccgggcgaagtaacggttaatatgacccgtactgcaggaaatgccatcgataatagaaattttaccgcagcggaatgtcgcttacgggaagatgtatttaaaatagcacgaatctttaaagagaactttgaagagtttaaaaacagttatgtgacgaccgtcgccgtacatgccggtattcgtgagacacgtcgtatcaaaggtgtacataccattacagcagaagaatatgtgaatgcttataagtatcctgatagcatatcacgcggcgcacatcctatagatatccatgtcgctgcaggtgcggaacagagcgtaactttccttaaaaaagcggcgtatgtaccttatcgcgctcttatagctgaagattttccgaatctgctcgtagcgggacgctgtattagtgccgataagacttcctttgcgtcacttcgcgttcaggcaagttgtatgggggtaggacaagccgcaggagtagcagccgcacaatgtataaaggcaggtgtgaccgtacaaaaggctgatattcacaatctcatagaggaattgaagaaacttggagcaattatataaagaagaaccagaatatggaacagttagattatattattattttactctactttctcggactgattgccgtgagtgttgtgatgtcccggaaaatcaaaaactccgaagatatgtttattgccgggcgaaattcttcgtggtggctgtcgggagtctcttcctacatgactatcttctcggcaagtacctttgtcgtttggggaggcgttgcttataaatcgggacttgttgcggtagttgttgcactttgtcttggcatagcatcgtttattgtcggtaaatggatctcgggcaaatggcgggagctacgtattaaatcgccgggagaattccttaccatccggttcggacaccgcacggtgagtttttacacaatttcaggaattatagcccgtgcggtgcatacggcagtgtctctgtatgcggtagcggttgtgatgtgtgcattaatcaaagttgatggtggcagtatttttgcaagtacgggtatgatgggtgattcaccgatgggttacctaagtatttggtgggcgcttcttatccttggtgccatcgctcttggatacaccattgccggaggatttcttgcggtactaatgactgatgtaattcagttcggagtacttctggccgtggttgtatttatgatacctctttcatttaacgcggtaggaggcgtaagtgcatttattgataaggccagtgagataccgggattcttctcgggcacatctccgacctatacatgggggtggcttttactgtggatatttctcaatgtgtctatgattggcggtgactggccgtttgtacagcgatacataagcgtgcctactacaagagacgcaaaaaagagtacttatttaatcggaattctttatatcgtcactcctctcatctggtatcttcctaccatgatttatcgtgtgatggaacccggacttgcgcttgatttggatgcaaccacaatgactttcaacggcgaacacgcttatgtgaatatgagcaaactcgtgctcatgaaaggaatggtcggcatgatgttggcagcgatgctatcggccacattgagtaatgtttcgggtattttgaatgtatatgccaatgtatatacttatgatatttggggacacaaagagaaaaaccgtcaggcaaatgagaaaaagcgtatcaaggtaggacgtctcttcacatttgtctttggacttgtgattatcgctttgtcaatgctcattccttttgccggaggtgccgaaaaggtggtagtaactcttcttactatggtgatgtgtcctttatacattccgtcaatatggggactgttctcgaagcggctgacaggcaaccaacttatttctgcaatgattcttacctggctcgttggtattatggctcgcgtcataattcccgcctccgttattagtccaagccttatagagtcagttgccggttgtgtacttcctgtacttatccttgcaattatggaagtttggtcggcacgtaaaaagtatgaagacaatggttatcaagccatttgtgaatatactgatcctgaagccgatcgcgaaccgacattaaaggagaagaaagcggtattaatctattcgcatttggctgttaactgcttctgtattaccattggtgtcgttgcgctcttactgacaggtctgcttattgctggagatccgaagacccttgcggtcaaaggaattgtgataggaagtatcatactgatgattgccatgatacttgcttatgtgatatacagaattatatatgcaagacgtctgaaaatgtctagctagtcaattattaataaccctaaatactaatcaaatgaatctaaagatgttattgtttgcaagtgtgtcgcttgtgctttttgcatcttgtcataactcggatgatccgtatatgacactcgcgacaaagacacttgatgtagaagcagaaggtggacttttcactgttgacctttcatctaatgtctattacagagtcaataacgattgccagaccgatggaagcgatagccattgggcagttgttgattcgcatgagacacaaggtgagattactaagtttacaatcaaagtctctgaaaattcatcgactagttcacgtgtcggtaccattcgtttcattggcgatgatgtaactcctctaaagctggttattacccaaaaaatgattgttccgaaaggtatcagtcctatcaccgaatcgattgacgcaactacaacagaatcctcattcaaagtctttggcgataaggagtggaaggctgtatgtgcagatgcggatgtgaccgtttctcctgcaaatggggtaggcgaatgtgatattaaacttactttcccggagaacaagacatttgccaaaaggacaattaaagtaacggtaaccgtccaggatgatacagactatacctatactcttgtacaagatgttttctcgggcattttggctgattgggacttgaatagtttaactgccaacacaagtggaacatttgctgatgatgaggcacaatcggtattcccgggaaccaatggcaagtatcttgctccgagtgccggaagtggtaagattgagtattgggcatgtgaccggacaggttatgtagtgcagaatgccgtatgtgagcgtgcagtgggtggtaatggtgacccgtatgtgtcaggagccgttcccggtgattattggtatgtctatggggatatgaaaggtacggttattcctgccggcacaaagattcacttctattttgtgaccaaattaggaacgatgtgttccaactactggatgattgagttcaaggatggagaagaatggaaaccggctcttccgacttcgactcttcaggaaagtgcgacagagactttgtcgggtgcgcctatcaattattcggcaactattacttacaattttgcgggaatgttgctcgataacaaaaataatggcgcatatatccctgccgaaggaatatttaccacgactaaggatatggatgagattgtgttaagatttggacaggcaggccgtctatgtcttaatggcgccaaattcgctggaaagtatatagactgtacacacgcaagcggccagacacgtttttcagcgcaacatccgagtaaccctgaaacaggtgaggcaatcagagaatataacgaacatgtattgcttgaaatcgtagaataaatagtatgaaaaaaagtatattaagcctgttattggcatgtttcctgcaaatcaatctggcttttgcacagaatgtaatgaagggtgtcgttagcgatgccaatggtcctcttgtcggagtggtgatccacgataaagacaatgcaaaaggtactacctccgatatgtcgggaaagtatgcgctcaatggcgctgaatcaggccatacaatagaattccgttatcttggttatgtgaccgagactgtggtatgggatggtaaaagtgtagtaaatataaaacttaaagaggatgctgtacaacttgaagagacggttgttatcggctatggatctgtaaaaaagaaagatcttacaggtgcggttggtgtaatcaacagttcgcttatcgagaaacagagtacgtctcaactttcacaatctttgcaaggactgattccgggactgacggttacccgttcgagcagtatgccgggagcgagtgctacggttcaggtgcgtggtgtgacaacaatgtctgattcgagtccgcttatccttgtcgatggtatgatggtcagtagcctcgacaatatagcaagcgaagacgtacagcagattactgtacttaaagatgcagcttctgcatccatctatggtgcccgtgctgctgccggtgttatcttgataacgaccaaggaggcaaccgagggacagctttcgatcggttataacggagagatttcgttgtcttctcctaccgaatttccgaaattcctgacagacccttatcactacatgacaatgtacaatgaatggtcgtggaacgatgccggtaatcctgcgggaggcgagtttgccaactattcacaggactacatcgacaactatgctaccaacaacagatatgatcccattcaatatcctatctatgattggaaagacgctattctttcgaataccgctatgcgccataagcacaacttgaccatgacgtatggcaacaaggtaatcaagagccacacttccgctacctacgaaaatgccgacgctatctataaaggttcaaaccacgaaagaatctctatccgttcgcgtaataatctgaagattagtgataagctctccggttctatcgatttctcggtacgttatgccacgaaaaatgacccgacttccggtagtccgattcgtgcagcttatatgtatccttccatttatttgggactttatccggacggccgtgtaggtcctggtaaagacggcagtcttagcaatacgcttgccgccttattggaaggcggagagaagaagactgtatccaacacaatgaccggtaaattctcgttgagctataagcccataaaagatttgacccttactgccaatctgactcctaccgtcggaactgtttcgatcaaggagatgaagaaagccatacctgtttacgatgcatacgaaaccgatgttatgctgggatatgtttcaggatatacttccaattcgttaagtgaagaacgccgtaacatcaaatcattggagaaacaattcatcgctacatacgacaagacctttagcaaggtacataacttcaatgccatggtcggttatgaagattatagttatacgtatgaaacgatgtcgggatcgaccaacgatatatctttgtcttctttcccttatcttgatttggcgaacaagaatgctcttgccgtagccggcaattcttatcagaatgcataccgttcattttttggccgtgtcatgtataattacgacagccgttactacctccagctcaatgctcgtgaagacggatcttcacgttttcacaaggatcaccgttggggattcttcccgtccgcatcggtgggttgggtcatctctaacgagaagttcatgcaaaacataaccccgataaactatctgaagttccgtgcctctatcggtacgctcggtaacgagcggattggaaattatccttaccagacatacatatcgttcaataatgccattatgtatgacagtgcaggttctacgccccaatcatcgatgtctgccgctcaacaggattatgcgtatgagaatatccattgggagaaaacacagagctgggatataggtgtggatgccgctttctttaacaatcgtcttgactttagcgcagactattattataagaagacaacagatatgctcttgtcggtggcaatcccgtcgtttacaggttattcggcacctgacaggaatgtaggtaaaatgcatacccgtggttgggaagtgaaactcggctggtctgaccgtatcggagatgtaagttatgcggtaagttttaatatctctgattacaagtctataatagataatcttaatggcaagcagcagtttaacagcgatggtaccattattactgaaggtgcagaatataactcctggtacggatataagactgcaggtttgttccagaccgcagaggaagtcagtgaaagcgctctgctttcggcttctaccaaaccgggtgatgtgaaatatgtagatgtcagcggtccggacggcactcctgacggaattatcaatgagacatacgaccgtgtagtacttggcagctcattgccacactatctatatggaggttctattagtttgggctggaaaggtctctctttctccctactcttcaatggtgtcgggaaacaactttcacgcctcaccgaaagtatgattcgccccatgcagggacaatggcttccggctccgtcagtccttctgaacgacaatggcagccgtaattattggagtgtatataacactgcagagcagaacgcggcagtcagctatccccgtttgagccatcagggcggtgaatacaacaactacaaaatgtcggattactggctcaagagtagtgcctatatgcgtataaagaatatcaacgttggctatacagttcctaaaaaaatcgtctctaaagtcggaatcaagggacttcgggtgtacgtcaatatcgatgatccatactgctttgatagttatctttcgggatgggaccctgaagcaggcgcttctacctatatcacacgcacttatacatttggagtggatatcaaattctaatggagtatgaaaaaattacataatatgaaaaaaatacatgtattgatttgcatgatagctcttctatctgtaacttcttgtgtgaacctcgatctgaatcctccttcagccgcatccagtgaaaactggttctcgtcaccggaggaagttcgaatctcgttgaacgatttttatcgcagtaccttctttgttatagaagaaggttggacgctggaccgtaatacggatgactgggcgcaacgaaccaacatttataccattgcggcaggttcactgaatgcgtcttctacaagtaatcctaacatcaagactgtttggagttacacgtataagaacattagtcgtgccaaccgaattttggaggcactcgacaaacttgaaggcaaatattccaccactgaactgaatacgcttcgtgccgaagcccgttttttcagagcatttgcttattcacgtttgattactctttggggagatgttcctttctacgtgacttcgattactccggaggaagcatttgagatggggcgtaccgacaaagctgtcgttctgaaacaaatttatgacgattatgactatgccgcagaaaatttgccggtcgcaaataataatagcggcgccacccgtgtggacaaaggaacggcttatgcttacaaggctcgtaccgctctctatcaacacgactacaggactgccgcaaacgctgcgcaagactgtatggatctggaagtatatgacttggcccctgattatggagaacttttccgcgacaagacaagaggaagcaaagaagttatcttctctgttgctcactcaagcgatcttgagttggatgaaaacggtaaacctactacacaggctatcggttcctttattgcccgttcggcaggcggtacacataatgcacaaccttcgtgggaacttcttgctgtctacgaaatgacgaatggtaagacgattgatgaaccgggcagtggctttgatcctcacgatccatttgccaaccgtgatccccgttgcctggaaacatttgctgctcccggcagccgtatctatggtattgagtggaatcctgcgccgaacgcactcgaaataatggactatacgcaaaatcgtatgattacaaataaagattccaaaggcggttcagatgcttccaactgtgcttacaatggttgttgcctgcgcaaaggcgcgcaagagtcatggcgtactactttgtataacgacaaccccgtcattctcatgcgttatgccgatgtcttgttgatgtatgccgaagctaagattgaactgggggagattgacgctactgtccttgcttgcatcaacgatgtccgtgcccgtgcttatggcaccacccgtacacaaaccaacgactatccgtccatcacgacaaccgatcagacagcattgcgcaaagtgctccgtcgtgagcgtcgtgtggagtttgcatgggaaaatctgcgctatttcgacttgcttcgttggcatcagtttgagaatgctttcggacacaatatgtacggatttacccgtacagccaacagggcaaaggaatactttgcggcaggcaactggttttggccggaggctccgacatttgacaaagacggatttccttcttttgaagcgatggccgacggaacctatatcgtccagcatggtgaacgtaagtatgatgagaagatttatttgtggccattgccaagtgatgatgtattgataatgaatggcaaacttgttcaaaatccagggtactaactttattaaataaatgatattatgagcattggagaaattttattgcgcagtcgctatcaaccattgaaaagggtgttgagctatgatgtattcaataccggctttaacggttggatgacattgatgcctaactttacggaatatcccgattttgatgttcccaagacattggtcaataaagaccagtggccaccggtcatgcttagttccgctactttcaggtatccgggcactcacggagctatgtccggcacttactctcttaaactttcgacaagacctgttgccgctccttatacggagattccggcggaaggttgtctgggacatgccattaagcggctttcgttctctcgtccgggctgcaaatatttgcagatagaatgttggtttacatacacggcggagcaggatgtggtggatggcggtgaccgtccgcaaccgggtttgcatgagagttccatccgcgattttggtatgggattcgatgtacaggagggtggaaaacgttaccatgtaggaattcgctatctcaatgcagtagatggcaaattaatgcagaagtggcagtatgaacattccaatgaagacataaccgaccgcgattgggcttatggacttgacggagactggtgtaagaggggagtcgatccctggtggttcggccgccgttatcctaatggcgaccacgatgggttcaaggatttgaaagatggtcatcagaaactcatttataatgaaaccgactgtaaactcaattggcaatacatgcgtctgaaacttgacacagagcttcgtgaatatgtagagttccaatgccaggacaaaatttgggatatgcgtggcattgcagccgataccgttgacggatatggacgcatcgacaatcttatcaatcctcttttctgggtgggtactgataccaatcgtcgtgtattcttttatatagattctgttgttgtttcacaagaataaaaggaggaatgtaatatatgaaaatgtttaatgattcccatcttgaggtaaagaagttctttaaaggtactttcttcactcatccttacgaggctggttgggcagatgaggctatattctttgttatggttgagaaaatagaaggagatcccgtattcgaaggtcgtgtacaactatcgcaagacggtatacattgggctgacgacggtagtgaacctataatcttcaaaggacttggccaacatattataaaggtaaattcaaattttggtaattatattcgtcttgccgtcagcattgaaggcggagagatgtttttaaatcttcatatagcatgcaaaggttaatatttatatttagtctgttcatccttgcgattgtaggatgcagctccaatgagtctcactcatttttgattcgcccggatggaggtggggaagatgctgccactgaaatagaggtaggtaaaacgattcctgcctggcaggagggtgtgatggatattcatttcatcaatacaactaccggtgaaagcatgtttgtaatattcccggatggtacgcaaatgcttatcgatgccgcaagttcgagtgttacgaccaactctaatagtaatacgaccaataccggtatccgtagtcgttgggatccgactctgacttctacccgtggttcacagattataactgattacattcgtaagtgtatggtatggacaggtaacagtacgattgattatgccgtacttacccacttccataatgaccacttcggcggttatacttcttccttgccgaaatcttccaactccgacacttattcgttgataggttttgccgagattttcgacaatttcaagattggtacgcttctcgatcgtggctatcccgattataactatccgttcgacatggcgacaatggcagacaatgctccaagttgtaataactatatcaatgcagtgaaatggcatgtcgccaatcaaaagttcgatgctgcgatattcaaagcaggggcgaataatcagatcgttcagaagtataatcctgcaaagtaccctactgcaaaggtgcaaaacgtggcagtgaatggagagatctggacaggttcgggcactaccacaaagaagacattccctgaactctcggagattacatacgaaaacagtaagaacattacctccagtgacaattgtccgccggagaatataaccagttgtgtgatgaaagtttcgtatggcaactttgatttctttgccggtggtgaccttcagtataacggacgttcgagtcatgcgtggaaagatgccgaactgccctgtgcaaaagcagtaggtcaggtggaactattgaaagctaaccatcacggtgtaaccaacaccaatcaggtggatgctctgaaagcactcaatccacaaacgattgttgtcaattcgtgggtagattgtcatccccgtaccgatatactgaattcgatggagacaacactccctgcgtgtgacatgtttatcactaacttctggcaaggcgatcgccccagcggagtagacgaccgggttacggcggaagaggctgcgagagtaaagggatatgatggacatattgtagttcgtgtgaccgacgggggaaacaaatatagagttgtgacaatcacagattctgacggggcaatgactgttaagactatttctggtccatatacaagcagataatgaatacaaaatattatgatgtaatagtagcaggtgcaggtcctgccgggatatgtgcggctgtagccgctgcccggcaaggagcacgtgttgcccttatcgaaagatacggagtcatcggaggtaacctgaccgccgggtatgtcggccctattctcggtagtgtaagcaagaacacgatgcgcgatgaggtttgtgctattcttggcgtcaaagacaatgactggattggcgaacatggaaatgctcacgatttcgaagaggcaaaacttacattggcagaatttgtcgccagggaaaagaacatcgatgtctttttgcaatgttgcgtgtcggatgttattcgtgacggaaaggtggtaaaaggcattaagtgtgcaagtaacgaggggacgctctgttttgaagccgcggttacgattgactgtaccggtgatgccatagtatcttttcttgccggtgcaaaaatagaaaaaggacgtgctgacggacttatgcagcctgtaacccttgaatacaccattgacggcgtagatgaatcgaaaggaattatctgcattggagatgtagacaatgttcaactgaatggtgagtgttttcttgattggtgtaaaaagaaagccgatgagggcaaacttccccggatgcttgctgccgtgcgtttgcatccgtcggtcagaccgggttgccgtcaggtaaatacgacacaagtcaatagggtggatattacttcggtaagctctattttcaccgccgatcttgaacttaggcaacagatacgcctcctgacccaattcttgaaagaaaatttgccgggttacgaaaactgtagagtgatcggaagcggtacaacaaccggagtgcgcgaaagccgcagggtgatgggcgactatgtgattgatgccgatgaaatggcggaaggctgccgttttgccgatgtggtggtacataaagcattgttcattgtcgatatacataatcctgacggagccggacaggcggaaccgaccatccaatattgcaaaccatacgatttgccgtatcgttgttttctcccgttgggcttggaagggcttctggtggcgggacggtgcatatcgggtactcacagagctcacgcttcctatcgtgtcatgagtatttgtatggcgatgggagaggcagttggtattgccgctgccatgagtgcgtcgcagcattgtactccgcgggctctcgatgtgggagagttgcagaaacggcttgagtcgttaggcgtagagctgttcgattaacgtagaacataatcatactttaaatttatagagcatacttatgaaaaagatctatttgtctgtcgtgtgcttactgatctctattccccttatcgcccagttgtatgtagagccggagaaagaggtagagtgctctgtcttcctggcaaaggaaggacgtgggcgggcacagcaaggacttgaaatatgggatgattacatattctcgtgcgaggatggagggcacgtgaatatctatgatttcaaaagtgccgatccgaaacctgtggcaggctttgagttggcgtcctcccatccggacaaccatgtaaataatgtatgctttggcgtcgagacaaaacgcggagcatcgtttcctctcttgtatatcacaaacgggaaggtaggaagcgagttggaatggttgtgttttgtggagagcatcacccgtcgtggaaaacgttttagcagcgaaatcgcacagacaattgaactcgatggctcgaagtgggcggagaaagggtatgtccccatctttggcgcaccaagctggctggtcgatcgggaacggggatttatatggatattctcggcgcgtaaacgtactgtggcgaaggtgacaaagcatgcatgggaaaaccagtatgtcgccaccaaattccgtataccgtcgttgagtgagggggcaaaggtgcgcctcgacgaaaatgacattctcgatcaggtggtgttcccctatgaggtatggttcacacaagcgggctgtatgcatgatggtaaaatctatttttgcttcggagttgggaaacaggatgacagccgtccttcctgcatccgggtgtacgatacggataggcggacgattactgcccgatacaatgtgcaggaacaggttatttacgagccggaagatattgtggtcaaagacggggttatgtatgtcaataccaatacgaatgcgaaaaagacgtctgatcttccttgcatattcaaactctctcttccgaaagaaaagccggtggccgaaaatcctctcgacgagatacgcagggacccggaacgtgcgggcggcgtgtattatgtgaccgatctttcacatccggttacgccggcacccaaaggatatacgcctttttatataaacggctatttccgtcacggagcgcgtcagatagacgatgaggtgacttatcctgccatatacggcgtattggagaaagctcatgccacaaacaaccttaccgattttgggaaagccctgtacgaacgtcttgaaccgttcaagaagaatgtgttttacaaagaaggcgatctgacacaaatcggttatcgtcagacaagggagataggccggaggatggtacaaaactatccggaagtatttgaaggccatccctatttgaagactaacgcaacgaatgtgcttcgggtggcagccaccatgcaatctgtaaattcgggcattttgtcgctgcgtcccgggcttgaatgggcggagatagacaactcccgttcgttccttaccacactgaatccctacggtaacgtatgtcccgacaggagtccgcttgataagtatatactcggtaaagaaaacagttggtataaaaaatatcgttcatatatagatgaaaagttggatgtggatgctttttttacaagactgtttatagacgtaacacaagtagaaagtgagtatgacaagtacgacctgatccatcgtttctggttaatggcatcactgatgcaatgcctcgaccgccaagtgcctatatgggatatttttacagaagaggaaatattggcttggggggaaatcgagaactataagtattttgcgcagaaaggtcctgaaccggtatctcacgggcgtagttggggacttgcatcccgcacgttacgccatttgttagacgaatctgccgaagatctggttcgcaagcgtcatggcatcaatctcaacttcggacacgatggcgttctgatggctatcttgacaaatctgcaagccggaacgtgggcgcgggaggctagtaattccaaagaagcgttgcagagttggaagtattgggatattccgatgggggcgaaccttcagatgatcttttaccaatcagaagacaatccggacgttttagttaagtttatgctgaatgaaaaagacctccggttgccgttggaagcggttgaagcatcttattacaaatggaatgaggtttataaattctatatagaacattgcgacaaggtggaaaaatcacttgccgaaacattgaaattatcgtatgaagacttttaattataatcgtgctgaaataaaggccggaatagtacatttcggcgttggaaacttccatcgtgcacatctcgaagcttacacaaatctattacttgaagatccgtcacaaagatgctggggggtattcggagccatgattatgcctacggacggggtattgttcaacgccctcaagaaagacgacggcatatatcagttgacgacatgcagcccttccggcgaacaggatagtatgctgattggttcgcttgtagaactggcatggggggaaatagatagtgagcctatcatcgctaaaatagcatcggaggagataaaaatcatctctctcaccattaccgaagggggatataaggttgattttaaccaatcgcgcagtgtgttctggtatgtagccgaaggacttaaacgccggatggagaaagatttgccgattacgattctttcgtgtgacaacatgcagatgaacggcaatgccgccaaatacgcgtttatgtcatacttcgaagcgaaatatcccgaggtggcagcgtgggcgaaaaagaaagtgacgttcccgaattcgatggtggatcgaatcactcccgtaacaaaaccgggtaaggttacagatgtgtgttgtgaagactttatacaatgggtgattgaagataatttcattgcaggccgtcctgcatgggagaaggtgggagttacattcacccatgatgtgaccccgtatgaaatcatgaaattaagtcttctcaatgcgtcacatactcttctttcttatcctgcctatatggaaggattcaggaaggtcgatgctgtaatggcagacgagaggtatcgtgcaatgataaagctgtttatgaacagggatgttactccttatgttccggttcccgagggcgttgaccttgaagcgtataaagaccagcttatcgaacgattttcaaacaaggcgatcagcgatcaggtatcacggctttgcggcgatggcattgctaagtttgcggtttatgtggtacccatactcaaacagatgttgcaggatgggaaggatatttcgatagaggctttcctgatagctgtttattgcaaatacctgataggtgcgcgcaccgagtccggtgaaaatatagctatctccgaacctcacatcaccccggcggacaggaagttgatttcgggaggatcgccggccgagttcttgaagatatcaccttttgtgtcattgggactggacaaataccctgtgtttatggaaaagtatgagcagttttatgctatgcaggtagcagaagggttgaaggtcttattacagtaaacaactaaaaaatccaaggcaatgaagaagtttttcataacggttgttctgtcgctttcgtgcgtattgtcggtttcggcacaaaaacagacggaggcgtcaacgcttaacctgataggtaagccgtttgaatcgactcccaatccgtatcatagagtcgatacattggtttataaaggttttaacaggacggagaatcgacaactccgttgttctgccggtatggctgtgttgtttaaaacgaacacgcgtaatatacagattacgacaaagtggggatatgtatattcgagccattcaaccatgccgatctcttataaaggatatgatctttatatcaaaaatgcaaacggtcaatggcagtatgcggcaagcggttcattgaaagcgtataagggcgagaaaaccgagacattcacgctcattgagaatatggatggtacgatgcacgaatgtatgatgtatatgccgatgtattcggaggtcatttcttgtaagatagggatagatgacgatgctgttatcgaaccgttgaagtccgattttcgtcacaggatagcggtatatggctcttcgtttacgcagggagtgagcacggatcgatccggtatgagttatcccatgcaatttatgcgtaatacaggtcttcaagtcgtgtcgctcgcaacaagcggacgttgcctgatgcaaccttacatgctcgacgttcttgcggaagtcaaggctgatgcctttatattcgatactttttcaaatcctgacgcagaactgataagagagcgcctgatgccgtttatcgatcggcttatagcggcacatccggctactccgttgatatttcagcgtacgatctatcgtgaacgacgttcatttgatacagttcttgatgcgaaagaacgggctaaggcggcaaccgtagaggagttgtttgcaaaaatccgcacgaacccgaaatataaagacgtttatctgattacgcctgatgcttccgatgcgcatgagacatcggtcgacggaactcatccaagtagttatggatatgcactttgggcgaagtcgatagagactccggtaatagaaattttaagtaaatatggtataaaatgagacaagcggtattagtagaaccaaaacatattgaatttcgtgaggttgaggcgcctaaggcgtcggacctgaaagaacatcaggtacttctgaatattaagagaattggtatttgtggaagtgagatacattcttatcacggatgtcatccggcaactttctatccggtagttcaggggcatgaatattcggcagtggtagtcgctacggcggcggcggttacgatctgcaaggcgggtgacgttgtcaccgcacgtccgcaactcgcgtgtgggaagtgcaagccttgtcagcggggagagtataatatttgtgaagagctaagagtgcaggcttttcaggcaaatggagctgcgcaagacttttttgtggttgatgatgacagggttgcggtgttgcctgaaggtatgtcacttgattatggggctatgatagaaccggtggcagtagctgcgcatgcaaccatgcgtggcggggacttgaaaggtaagaatgtggttgtatcgggtgccggaacaatcggtaacctcgtggcgcagttcgctaaggcaagaggagccaaacgggttcttattaccgatgtgagtgatttcagacttgaaatcgctcgtaaatgtggcataatagatacgctcaatgtagctaagacgccgctcaaagaaggagcgaagaggcttttcggggatgaagattttcaagctgcgtttgaggttgccggagttgagtcgagtattcgttcgcttatggagtgtattgaaaaagggagtaccatcgttgtagtggcggtatttggcaaggatccgtcgcttaatatgttctatttgggagagcacgaactgaaggtgaacggaacgatgatgtatcgccatgaagattatcttacggctatcgatcaggtaagttcgggagctatccgtctcgaaccgcttatttcgaatcatttcccgttcgagcagtatgacgaggcatataaatttatagacgagcatagtgcaacatccatgaaaataattattaaactataaaaccatgaaaataataggtataggagaagttgtttgggattgcttcccggaaggtaagagacttggcggagcgcctatcaatttctgtttttttgcaaaggagttgggagcagaatcatatcccgttacggcaataggtgaggacgaactcggcgatgaaacgtttacagtgcttaaagagaccggacttgatttaggatatatttcccgtaatattttgccgacaggtaaagtgcttgtgtcgttgaatgaggccggtgtaccgcaatatgacattgttgagaatgttgcttgggatactatcgagtgtagtcctgcgaccatgaaacttgtcggcgatgcagatgctgtttgttggggctctttggcacagcgaagcgaaaagtcacgtgctgcaatcttgagactcatagatgccgtgccggatacctctttgaaggtgtttgatattaatatcaggcaacatttttattcgacagacttgattgtggagtccttgcaaaaggcaaatgtcctcaaattgaatgaagacgaattgccgttattgatttctcttctttctctttctactgattttgtggaagctatcgcagaactcattgctcgtttttcgctcaagtatgttatattcacacaaggggcagtacgtagtggcatatatgatgcaagtggggaagtgtcatccataaacacacctaaagtcgaggtggccgatactgtaggtgcaggcgactcgtttactgctacctttgttgtgaatatacttagaggggcgtcggtcgctgaatcacaccgcaaagcggtagatgtatcggcatatacttgtacacaaaggggggctattaatccgttgccggatagtaaaaagtaatctcttttgattgcattttatagataactccagttaaatagttatttttgcagaaataactgatttttacgaaataaaggaacccatgttgaaaatattagtaacctacgccgtacaaggcgaatttgtagaacttaaatggccggatatagaaccttactacgttcgtacaggtattggtaaagttaaatcagcctttcatttggcagaggcaatccgccaggtacaaccggacttggtgctcaatatcggaagtgccggaacagtcaatcatcaggtaggagatatttttgtatgtcgcaagttcatagaccgtgatatgcagaaaatgaaagagttcggcttagagtgtgagatcgattcatcagctttgctcgaagaaaaaggttattgcacgcattggacggaacatggaatctgcaatacaggagatggcttcctcaccgagttgactcacgttagcggagatgttgtagatatggaagcatacgcacaggcatttgtctgccgttcaaaagaaatcccgtttatttccgtgaagtacgtgactgacataattggccagaactccgtgaaacattgggaggataaacttgccgatgcacggcagggactatcacactatttcaatgtcttgaaagaaagaatatgataagtgactcctgcggctatcaatcccaggagaatctttacccatataaaaggtattaggaagaaaatgcaataaagcatcgttccccacattaatacgagagaaattattttggcacggagaggaatcgccttgttttcgcggaaattgcggatataaggaccgaagtgccgatgattgagcagccagttatataatcggggtgaccctttgaaataaagggcggcggtgagcaatagaaaaggggtagtgggcagtaacggcagaaagatgccgagaataccgagcgcaagggaaatactacctaaaacaatatatagagttttcatgcggcaaagatagtgcaaaaaaagggaaaaaataacactctttgctggatgaaaactctattttatattacctttgccgttgcatcgaggtgacattagatgcgtgtaactattaaaatacatacactcatgtttacagtaatcaaacgcatggagatctcggcttctcataagctggtactcccgtatcgcagtaaatgcgccagtttacacggtcacaactggattatcaccgtctattgccgttccgcacggctcaactccgaaggaatggtggtagatttcacccgcatcaaagaagtggtcacggagaaactcgaccatcaaaatctgaacgaagtactcccatttaatcccacagcggagaatatcgcccggtgggtatgcaaacagattcctcaatgctataaagtagaagtgcaggaatcggaaggaaacattgtcatctacgagaaagatcccgtcggcgcagaaggacaagaatagcaaaccaaacaaattttgatgatgagaaagattaatgaaatcttttacagcttgcagggcgaaggctaccataccggaactccggccatcttcgtccgtttttccggctgcaacctgaaatgtgacttttgcgacacacaacacgaagaagggaaaatgatgaccgacgatgaaataatcgccgaagtgaaaaaatatcctgccgtcaccgttgtccttacgggcggcgaaccttccttatggatagacgatgaattgatcgaccgtttgcatcaagcaggcaaatatgtgactatcgaaaccaacggtacacgccccctgccggcagctatcgactgggtgacctgctcccccaaacaaggggtgaaacttgccatcgaccggatggatgaagtgaaagtggtctatgaaggacaagatataagtatttttgaactacttccggccgaacattttttcctccagccttgttcttgtaataacactgcttcaacagtggactgtgtaatgcgacatcccaaatggagactcagcctgcaaacacacaaattaatcgacatccgttgaacaaaatagacgggtgatgcggaagaagcttaaattattacaaaatatagtatgaaagtaggtttgtttattccttgttatatcaatgctatttaccccaatgtgggagtggcatcgtatagactattgaaaagtttgggagtagacatcgattatccgttggatcagacttgttgcggacaaccgatggcaaatgccggttttgaagatgaatcgatgaaattggcactccgttttgacgatctgttccgtgaatacgattacatcgtcggtccttccgccagttgtgtggcatttgtgaaagagaatcatccgggcatcttggagaaagaaggacatgtttgtcagagtgcgggaaagatttatgatatttgtgagttcattcacgatgtcttgaaaccttccaaaattcctgcacgctttcctcataaagtcagtattcacaatagctgtcatggggttcgcgaactgttgatttctgctcccaccgaactgaacatcccttattacaataaattgcgtgacctgctcaatctggtagaaggtatcgaagtattcgagcccagccatattgacgagtgttgcggctttggcggaatgtttgcggtggaagagcaggcagtctccgtctgcatggggcgtgataaggtaaaagatcatatcgctaccggagccgagtatattgtcggagcggacagttcctgcctgatgcacatgcaaggtgtcatcaaacgggagcatctgcctattcagattatccatattgtagaaattctagcgtcgcaatcatgagtacaaaacattcaaaggctgccgaaaagttcttgcaggacagcaagatggcagcatggcataacgaaaccctttggatggtccgtgccaaaagggacaagatgagcaaggaagttcccgaatgggaagagttgcgcaacaaggcttgcgagttgaaactatactccaacagccacctcgaagaacttctgctggagtttgagaagaatgctaccgccaacggcgccatcgtacattgggcaaaagatgccgatgaatactgcgccatcgtctacgaaatactgaatgagcataacatccaccatttcatcaagagcaaatccatgctcgccgaagagtgtggattgaatcctttcctgatggagcgtggcatcgatgtcgtagagtccgatttgggcgaacgcatcctgcaattgatgcatctcgaaccaagccacatcgtattgcccgccatccacatcaaacgggaacaggtaggcgaactattcgaaaaggagatgggcacggaaaagggaaactttgatcctacctacctgactcatgccgcacgtaagaacctgcgtcatctcttcctcaatgccgaagccgccatgacaggcgccaactttgccgtcgcttcaaccggtgacattgtggtctgcaccaatgaaggaaatgccgatatgggtacttcctacccgaaactgaacattgccgctttcggtatggaaaagatcgtcccggatctggacgcattgggtgtgttcacccgattactcgcccgttcggccaccggacaaccggtgacaacatatacttctcattaccgccgtccccgcgaaggcggtgaatatcatattatcatcgtagacaacggccggagtgccttactgtccaagcccgaccatatcaagacattgaactgtattcgttgcggtgcgtgcatgaatacctgcccggtgtaccgccggagtggaggttactcttatacatacttcatccccggacctattggcatcaacttgggtatggcccatgctccggagaagtattatgataatctttcagcctgttctctgtgtatgtcctgttccgatgtctgtccggtgaaagtagatttggccgaacagatttacaaatggcgtcaggatttggacggactggggaaagccaatacaggaaagaagatcatgtccggtggtatgaagttcctgatggagcgtccggcattgttcaacgcagccttgtgggcagccccggtggtaaatggcctgcctcgtttcatgaaatacaacgatctcgacgattggggaaagggacgtgaactgccggaatttgccagcgagtcgttcaatgaaatgtggaagaaaaacaaagtacagggaaaggaggaatccaaatgagcagtagagaagatgtattagccagcatccgccagcatacgcagacgcgttatgataaaccggatattgcggatatgaaacgattgtcatatcctgacaagatagaacagttctgtgcaatcagccgtgcggtgggtggtacggcagttgtattgggcgaaggggaagatgtgaatgcggtcatacgccggacttacccggatgctatgcgcattgcttccgtattgccggatatttcctgtgctacgttcaatcccgataatttggatgatccgaaagagttggacggcacagatgttgccgtagtgaaaggagaaatcggagtagccgaaaacggagccatctggataccgcagacggtaaaatataaagcgatctattttatctcggagaagttggtcattctgctcgaccggaataaaattgtagataccatgtatgacgcctaccgcgaactggacggacaggaatatcagttcggaacgttcatctccggtccgtcaaagactgctgatattgagcaggctttagtgatgggagcgcatggggcacgggacgtgttagtgatattaacctaatgtttccgtgttgattattctaaaataaatttggtttcaaaacaatggagttttatatttgttagtacaaacgaaatggagactccgttgacgctgtaaaaacagaggctctattgataagaaatagagcctttgtttcatataaacagagcttccgtttgatgtaaatagaggctttgtttggataaagtccggcttccatcggatgtaatagagtcttttggagaatatagtcgaatctcctttgatgtaaatagaatatctgtttctgtttgtccatagtagataaatgaatttgtaggataagagtagtaaaacgtttaattataaattatatgtatgccaataaagtaaagaaaatagccgccgtccatgatctttcgggaatggggcgcgtatctctgaccgtcgtcattcctattctttcatccatgggttttcaagtctgtccgcttcctacggctgtattatccaatcatacgcaatatcccggtttctccttcctcgacctgacggacgaaatgccgaagattattgcccaatggaagaaactggaggtagagttcgacgctatctataccggatacttgggttctccgagacaaattcagattgtttctgattttatcagggactttcgtcgaccggacagcctgatcgttgccgatccggtgttgggagataacggacggttgtataccaactttgatggagagatgataaaagagatgcgccacttaatcacgaaagcagatgtgattacccccaatctgacggaactgttttatttattggataaaccctataaagcagataacacggatgaagaactgaaagaatatcttcgtcttttgtccgataaaggtccgcaagtggttatcatcaccagtgttcctgtacatgatgagcctcataaaacatctgtctatgcttataaccgtcagggaaaccgctactggaaagtgacctgcccttatctgcctgcacattatcccggcacgggcgatacttttaccagtgtcatcaccggctctttgatgcagggagacagtctgccgatggcgttggaccgtgccacacagtttatcctgcaaggtattcgtgccacttttgggtatgaatatgacaaccgtgagggtattctattggagaaagtgcttcataatttggatatgccaatacagatggctagttatgaattaatataaaagataaagagttttcacggctaagaaaaaagtcacactgtaaagataaagaataagggctgactaaaaaggacggaattggtataaccatcccatctgcgagtgtacgtaagtagggatgaaaaacaatttcccagtctttttagtcagtcctttttaacgtttacaagcttttgtgtttcaaatatttccattaattttaccggcattaaaaaaaggaataattatatctaactaatgactcaaacactaaaaacatccgaacgtcttggagtagtggatgctctgcgcggatttgcccttttggcaattgtattattacataatctggagcattataatctgttcttagtaccggagaatgtgcctgcatggttacagacaattgataaatatgcatgggacatcctgtttttcctgtttgcgggaaaggcgtatgctactttctctttgttgtttggttttagtttttacattcagtttcacaatgcagagaaacgtggtatagacttccgcggacgatttgcctggcggatgtgtttgcttttcctgtttgcgcagttacatgccttattctataacggggatattcttttactctatgcggtagtgggttttgcgttgatacccgtgtgcaagctaaaggacaaaacggtcttttggattgccctcattctgcttcttcagccttatgagtggggacgtgccatttatgcgatgataaatccagactatgttgtatcaatcggtcattttatgccttatgctatgcgtgcacaggaggcaactgccaatggtaacttcttcgaagtactctgttccaacatctccgacggacaattatacagcaatatctggcaagtggaaaatggtcgtttgtttcagacggctgccctgttcatgttcggaatgttactggggcgccggaaatatttaataaagagcgaagaatccgtacgcttttggaagaagatgttgaaaggtgccgtcctcgcattcattcctctctattgcctgaaaacttttgtgccggacttactcaccaatccgtccgtacaaattccttataagattgccgttccgtcctatgccaattttgcgtttatgattatcctggtttctatcttcaccttgctttggtttaagaaagagaaaggatatggctggcaaagtctgctgattccttacggtcgtatgagtctgacaaattacatttcccaatctattatgggggtaatcatctattatggattcggattagctatgtacaaatatgccggagcaacggcaagtctgctgattgcattgctcatctttactgttcagctgatattcagccgttggtggcttgcccgtcataaacagggaccactcgaattcttatggcgtaagggtacttggatttagtgacttcccactattcgaatttgacagttacttctgcaagtttgttgccgtaaatccagtccggtccctcctggatcaggcggattgcttccttatcagcagactcgcaaaggctctcttttactttgatgtagaagggacgcccttctttattaacaaggaaagttaatacaacttttcctttcacttgtgcgcacttttcatccgccggacgaacgagattctccttcaggtatttctgatagctacgtttaccgatgacaggttgtggagtgatctctttctctgcctgttcctcaaccttcacaacacttccgagggttgttgacttcttatttttcttagcgccatatcccactaccaccacttcattgagtgtctgtttgttttcgttcatggcaatgagcatcgtccggctggtatctacccggatttctaccggatcatatccgatatattcagctgtcaatcgtttcttatcatcctttttgactaacgaaaattctccattcatatttgtgatggttccgatattcgttcctttatatgtcacactggctccgataagcggttctcctttttcgtcggtcactctccctttaatcatgttattttgaggaaggatagtcgctaccttagccatcttcattttcttatctgattcagattcgaaagtatctatcgttgctactacttcttgcaatgcagcagtctcttccgagacttcttccatcatcggcacagctgccacaggcgcaccttgtggttgcgaagtcgtttggattttggcaatcatatctttcttatccgcttgtctcgcagtaatttcggaaataggagtggaatccgtttttacctttgtagtagctaatgcgatttccttttgcggagttgcgggaactgttggagtggcaggaattgccggagttggtggagctgcgggttcagccaactttgtggaaacactctcttccgcaatgaacacttcatctgtcatgctctttttcaggaacaggaaataactgctgataccgaatccgataatcagacacgcagcgatgctccaggtgatagcataagtgttctttttctttgccgaatgagcagaaacctgcatccgcagtttctcgatccgttgttcgtgatttccctccacctggttgtatccatccatagcatcggccaggaaagggtcttgcatcgactctttttccagccggtgtgcctcttttcctttgcggagtcctcgtatgtagtccaatagtttcatagggcttgtttcttaatacaaatttttaagtttcgctttccgttttggatatagcttttcacattgttcagagtaaatccggtctgttccacaatgtcggcatacgacatttcctctaaaaagaaacgcgtaatgctggtccgttgttcttcgggcaacttttcgagacagtgatgtaatgcctttagttgttcctctgaactttcctcctcacttaatagatgcagaaattcgtcggattccataacattaacggtataatctaacgtaatttctttattttcctttcgtaaaagttgcaagcaatgattctttgccacccggtagagccatggcttgaacacttttatctcataatttcccaatttaggcaataaatcttcaaacaactgcatgaccgcctcctgtgcccggtcttcatcatgcagatattttaggcaaagtccgtatagtaacgggatatatcggttatataattcgccgaaatattccgtatcaccggacttcgtgtaatgtattagtaattcctcgtccgatagttttgatatttttcttttgaaaaacaacatctattcctcttcttcgtcaataatgacttgatatttttctttcattgcttcaaaatcacctgtaatctggtctaatatttcatgcgtatccgtactctttaccaatgcgggcataccgtaatagatagatgctttatatggcaacaatatcattttttctttgggcagagaacgtcccataccggtcatgaatacgggaatatatttcacttcgggtcgcagagacaggatgcgggctatgccggatttaatttttcccatctgttccggctttcctctggttccttccggaaaaagaatcagtgaatatccggcgtcgatggcttcaagcatcttacggatcggatcatgctccgaatctttttctccttttcttctgattagcagtgtgttgatgaaaaagttgctgatggaagcctgaaagcgggttttcccgaaataatcttctgctgctacgggtttgactttccataaaagtcctccgggcagggaagataacaagcttagggtgtccagatggctgttatggttggcaaggatgatgaattgcttttcctttttgaggaactggcaatcggtgaactgaactcctacaaccaatttcagaaaccattggaatacacctttatatataatctgcatggcagcagcttgcatgaatcttttttccattccctccgtttaatatgcaatgtaataaactaaatgaaaaaatacaggagccgtgtaggccagagaatctatccggtcgaatactcctccatgaccgggaatactgttccccatgtccttaattcctttatctctcttgatggcggagatgactacgtctcccgagaatccggcaatcgcaacgagagcacttaccaggataacgttgggagcggagaggggagtcaggaaaccgaggaagtaaccaatgacggtagtactgattacaccgcccagaaatccttcccacgttttgttcggacttactttcgggagtatcttatgtcgtccgagaagtttgccccagataaattgcataacatcgttgatttccgtaaggaatacaaggaataatagcagacctcgtcctcctgcattgaatcccggaagttcaggaagcgacaggagataagcgaggtggctgataccgaatactgaaagcatcagaatccactgcaacagagccatcgacttggtaattccgtgggtgtctccctttaaaacaagtcgtaagggcaatacgagaaacataactaccggaatgaagatgatgaatgctccataccaggcaaggtaagcaaggtaatattgaatgggaatggccaatatcccccaaaacaatgctccgcgatctgcctctctgaatcccaacaccgaatacagttctctgaaagcgatgaaagagagaaaggcaaggaagaagtaagaaatgttatagctgataaatacagcgccgataaacatgcccgccatgatccaccatgaacgcgtgcgggcggagagttcgctgatatttgtttttggagagatcttctttacgagaaaaagaataaggcttgccgtaacaagcagtccgatgatgagcgaaatgacgataatcaattcatcgcttagcgtaggaaatatgatatccagtagttctttcattttatttcattgtttgttgtgtgtgacatgaggtacagacggtgtatcagtgttgcgacaaggccgacgttgattattatcagagctatgagacataccatccggtcgtatcctgcgtgaatggtgcaggtggctactacaaaggcaagcgtgagcaatgccatgcggtgttgcttggccatcggaccgttaaagaaatgctggtgcgttttgtaggctcctatccagcggaaataagctgtcataacggcaagaagggccgctagccatcccagttcaataccgaatccacctgctatatatccgatgggaatgatgaacaaagcatcagcaaagcggtcgggcatatcattgtagagatctccgttggcacttttcttccctccttcaatagctaccatcccatcgaacaggttgcagagtaaccgcgactgcatgcaaacgatgaacagaatgtaggctacatacttgttaaaaccgggatcaatgactgtgccgatcaacagaaggcaccccaccatagcgaagaatacgctcatcatggaaatttgattgggagtgacaccccaacgagttagtttgcgggcaataatagtagcccaggctgtgtttcgtgaggctatttcccgccttccgtcgacttcgtttttcatatttataatatgtttatgatcggcaaatatacacatcatcttaagagttgcaaaggaatgagtgagaattttgaaatgactcttttttctgccggataaaaaaaagttcaggcaatttatggaatctgtgtgaaatgtgcatctctataataaaagcgaactaatagtaacattttaaaataagaagttatgaaaacaaatcaattcagagcgatgatgctcgtactgctaatggcggttatttctttaggtaggatgaatgcgcaagttattactgtgtcgggtacggtgacggatgcaaaggatggaaatccgcttgtaggttgttcggtacagatcaagggtacttcgaagggtgcaataacgaatatgaagggccagtacaccattcaggccaagaagggggagacgttgttgttccagtatatcgggtataagcaagagagaagggtggtgaaatcggctacgctggatgtgaagatgaaagctgatgatgtggtattggaagaatgtgtagtggtaggatacgggcatgagctaaaggctactaaatcggtgtctgctgcttatatggcggtatgtccgacaccgggaatcatgtatgatgctgtaaatgcggaagaatacgggcagattcaggagaatggatttaagagtgtgtcggatgctccgctttctactttctctattgatgtagatgctgcttcttatagtaatatgcgtcgttttatcaataaaggtgaattgcctcctgtagatgctatccgtacggaagaattagtgaactacttttcctatgattatccgaaaccgacaggaagtgatcctgtgaaaatcacgatggaagccggagcatgtccctggaatgcggttcaccgtcttgtgcgtattggcttgaaagctagagaaattccgacggataatttgcctgcatctaacctggtgtttctgattgacgtctccggctctatgtggggagccaaccggttggatttggtgaaatcatctctcaaattgttggtaaacaacttacgggataaagataaagtagctatcgtgacttatgcaggcagtgccggtgtgaaactggaggccactctgggtagtgacaaacagaagattcgtgaagcgatagatgaattgacggcaggtggttctacggcaggtggtgcgggtatcctgttggcgtataaaatagccaagaagaattttatctctaatggtaacaaccgtatcatactttgctccgacggtgattttaatgtgggtgtttcttccgccgaaggattggaacaattgattgaaaaagaacgtaagagtggagtgttccttaccgtattaggttatggcatgggtaattataaagataagaagattcaggtgttggcagaaaagggaaacggtaatcatgcttatatagataacttgcaggaagccaatcgtgttttagtaagcgaattcggcgctacattgcatacagtggcgaaagacgtcaaactgcaagtggaatttaatccttcccaagtgcaggcgtatcgtttgattggttacgaaagccgtctgttgaaagacgaagactttaataatgatgctaaagatgccggagatatgggtgcgggacatacggtaactgctttttacgaagtgattcctacaggtataaagaatgaatatgtgggtaaaatagacgatctgaaatatcagaagaaagagaaagtgacagtgaaaccgacaggctctaatgatctcctgactgtgaaactgcgttataaagctccggataaagatgtcagcaagaaaatggaacttcctttcgttgataataaaggtaataatgtttcttctgatttccgctttgcttctgcagtggctatgttcggacagttgcttcgggactctgacttcaaaggaaatgccagttacgataaagtgattaatctggccaaacagggactgaataatgatgataaaggatatagaagagaattcatccgtttggttgaggctgccaaaggattggaaagaacgaataagaactaggaaatcgggcgggagtcattgtgagtgtacgctatatgactatgcgtaagattcgcagatatgaatgaacgtagaattccagatggataatcgtagaaaatgatagtgacggtatatgttcgggatagtgacgctatcgctgttgtataccgtcactatctttgtcggatagcgtcactatcatttatttcgtccgaatttcgtccgacctgaaacgaaaaatagccgtaaacttattgtttacagctatttaactctgcacgggaggagaggctcgaactcccgacacccggttttggagaccggtgctctaccaactgagctactcccgtgtttgcggctgcaaaggtagtagaaacttctgaatctccaaacattcgggtaaataagttttgaattattttaatttttcccactcatcgggcttaaaaccgaccagaacgaagctgtctgtcactaccaatgggcgtttcaccaatttaccgttggttgccaatagtgctatctgttcttcctcactcattgcaggtagcttctcgcttagtttcagctctttatatactaatccgctcgtgttgaagaatttcttcaccggcagaccgctgcgcggaatccatgcctttaattcttccaccgtaggattttcttctacgattaagcggttggtaaactcaatgttattttctgttaaccatttcttggctttttggcatgtgctgcatgccgggtactgcaaaaataatgttgccatattcatttataatttaatacttgatatttaatacttaatacttgaacttcacttcaatatctgtaaatcctgaaacataatccggtaagcggctgctttcttgtccaatgctaatggatacgcccttgatgatgagggcatccggtatagtcgcaaggcacgaccttcgaaaacaaattcggagtaatcacctactttgggttcttctatgtcgaattgctgtcggagagtgtccgttgctttttggcccgtagtgacgattgctttgcattcgggaagctgccgcagtaatgctgcaacatcggtggcttccactacttcaagaaacttgtccgatgcattatcctgcaaccgacgaatggatgaagcggtatcaaatagggcaatccccttttcgtttaaaaagtctatgatttgctcgcggcagaacgattttagtgtcgaattcagaaagtgattcttatcattaaagaataagattccatatatacgccacatgtcgttgtttaggttcgggtagtaaaactccatagaccaacgttttttctgtggcggaaaacttcccagcataagtaattttgatttcgctgggagaaacggttctaacggatgtatttcgatttccataatttctttcattttaatttcgtacaaaaatagtgataatgtttatttccttcaaaatcaatgagaaaaaatgctagatttaaaataattagttatttttgcggcgtgatgaacaaacaatattttattatatcattgaaaaaagaagtttttgtgagttgcttcttaataggcctgttttttctggagggaggaaattgttatgcttcggagcaacaagcgttaagagggacgatagaagttccttctgatcataataccgtgagagggcgtgtaattgatatctatggtgaaccactgatcggtgctacaatacgcgaaaaggggggagccaatggtactgtgaccgatattgatggaaaattctttttgtctgtgccggatagtgctgtcttacaagtttcttttgtgggttataagactgtagaagtcaatgtggcaggtcggaatgtgcttgaaatacgtcttcaggaagatgcggtgatgcttgaacatgtcatcgtaacggccttgggacttgaaaaggatgaagctacattggcctattctgtgcaaaaaatcaagggagaagaactgaaccgtgtcaaagaagtaaatatgattgctgctctggcgggaaaagctgccggtgtgcaaatcaacaaaaactcttccggtatgggcggttccgcaaaagtcagtctccggggaatccgttcggtatccggtgataatcaaccgctttatgtaatagatggagtgccgatgtcgaatacctcttccgaacaggcttattcggctattggtggtacggcgaatgcagggaatcgtgatggaggagacggaatctctaatctgaatccggaagatgtagaaagcatcagtattctgaaaggtgctcctgctgcggctttatatggtagcatggctgctaacggagtgattcttatcacgactaaaaaaggcaactctgtcggacaaaggaatattaatttctctacaggactcactttcgagaaagcattcagtatgcctaaaatgcagaatcgttatggtgtcagtgatgtggtagacagctggggagagaaagagaatctgatggcttatgataatctggatgattttttccgtaccggattgacatcgatgacttccgtatctatcagttatggaaatgaaaacctgcaaacttatttctcctatgccaatactaccggaaaggggattatcgacaagaataaactgaaaaagcataatataaacttgcgtgagacggctaccatgttcgacaaacgtctgaaactggacggtagtgtgaatgtgatgaaacagaccgtcgagaataagccggtgtcgggaggtttctatatgaatccgttggtagggctctatcgttttcctcgtggggaggatttgtcttattataaagatcattttgaaacctatgacgaagaacggaaactgggtgtgcagaattggcatacgtttaccgaagacttcgaacagaatccatactggataacgaaccgcatacaaagtaaagaaacacgtacacgcattatcctttctctttcagcaaactttaaggtaaatgattggctgacgattcaagcccgtggaaacatggattattgggcggacaagttacgccagaaattctatgcgtctactgccaccgccctgtgtggagcgaacggacgatatatcgagatggattatcaggaaacccagatgtatggtgatgtcatggcgatggtgaagaaaacctggggggattttacactggatgcggcgattggtggtagtataaatgataaagtcgttaattctacccgatatgattcgaaaaatgcatctttgaagtttgctaatgtgtttaatattgccaatatcgtcatgaacagttctgccagtattgaccagcgaatagatcaacgccgtcagttgcaatctatattcggtacggcacagatcggttataaggaaaaattgtttcttgatttgacggcccgtaatgactgggcgtcaaccttgtcttataccagccatgaaaaatccggattcgcttatccttctgtagggctttccatgctacttgataaatgggtgaagttacccgaatgggtttctttcgcaaaattgcgtggcgcttatagtaaagtagggaatgatattcctccatttatcactaatccctcttcgcagatcaatgccggtggcgagatacaggcgaatgacgccgcacctttcaaggaaatggagccggaaatgactcatgccatcgaatttggaactgaatggcgattctttcaacaccgtttaggggttaatctgacttattatcgtaccaatacttataatcaattcttcaaacttcccgcacttgcaggtgataagtatgcttaccgatatgtaaatgccggaaatatccagaatcggggatgggaattgacactgaatggaactcccgtattaactcctgatttcaactggaaaacttctgtaaacttctctaccaataagaataagatagtgaagttgcacgaagatctgaaagaaatgatttacgggcctaccagtttttcttccagctatgccatgaaacttattaaaggcggttctatcggtgatatatatggtaaggcttttgtgcgtgatgatgcaggcaatatcgtttacgaaacagagggtgataataaaggacttccattggtggagggcgatgggaatacggtgaaagtaggaaatgccaaccctgtctttatgatgggatgggatcatacattctcttacaaaggcttcaccctttattttctgcttgattggcgctacggaggtgaagtcctttcgcagacacaggcggaaatggatctttatggagtatctgaaataacggccgatgcgcgtgacaggggatatgtaatgctcgacggtcagcgtatagacaatgtgaaaggattctataaaatagtaggcgggcgtgccggggtgacggaatattatatgtatgatgctacgaatttacggttgcgtgaagtatcattgagctataatttctccaagaagtggatacagaaaacgaaggtactgaaagatgttcagctttcgtttgtagctcgcaatctatgtttcttgtataagaaagctccttttgatccggatctggtactttctaccggaaatgataatcaaggaattgaagtgttcggaatgcctacgacccgtagtctgggctttactctgaaatgtgaattttaaaggcaggagagagaaatgaagagaaaatatgtatatctatatttgttggggttattgctgttctctgtagcttgtaccggtaatttccgtgattacaataccgatttgtccggtatcacggatgatgacttgattattgatgacaatggctatggaatccgtttgggaattattcagcaaggtatttattttaattacgactacggaaaaggaaagaactggcctttccaattgatacagaatctgaacgcggacatgttcagtgggtatatgcatgacggcaaacctctgaacgggggctcgcataattccgattataatatgcaggacggctggaatagcgccatgtggacacacatgtattcttatattttcccacagatatatcagtcggagaatgctacccgaaatacacatcctgctctgttcgggataacgaaaatattaaaggtggaagcgatgcatcgtgtgacggattattatggtcctatcatttataagaattttgctaatgccgaaaaacattaccgtccggataaacaagaggatgtctattatgagtttttcaatgaactcgattctgctgtagttgctctcaccaactatatagatgagaaaccggaatccaatggatttgcacgttttgatattttgttggatgggaaatacgcttcctgggtgaagtttgccaattcgttgcgtttgcggttggcaatgcgtattgcctctgttgctcccgataaggcttgtgctgaaatacagaaaataaaagaaaacgattatggcttctttgaagcggaaacaggcggagcaatcgtttctaccaaatccggatataccaatccattgggagaacttaaccgtgtgtggaatgaaacttacatgagtgctaacatggaatcaatcttggtcggatatgatgatcctcgtcttggagcttatttcgaacactgtacggatgaagctttgaaaggacaatatcgtggaattcgtcaagggacatgttttgctcatagtcattattctggattgtcgaagctgtttgtcctgcaaagcaccgatgcgcctctgatgactgcttcggaagtctggtttctgcgtgccgaagccgctttgcgcgggtggaccgatgaagatgaagaagcttgttaccggaacggcgtaactacctcttttcatcaatggggaatttatggggtggaggattacctgaaaagtgagctgacagcttccgactttatagacacttatgatgaagaaaataatatagaagcgcgttgtaaagtcactcccaaatggaatccgcaggatgataaggagacaaaactggagaagattatcacgcagaagtggattgccatgttctcggaaggttgcgaagcttgggccgaacaaagacgaacgggatatccccgtttatttcccgttcgattcaatcatagtaggagcggatgcatcgacacggagatcatggtgcgccgtcttaatttcccaggtacattgcagacagaagacccggagcaatattctgctcttgtcgaggctttaggcggagatgaccatggaggtacaagactctggtgggatacgggaaataataacctggaataaaaaaagacagaagtaatgtgcttatatgtgtagctttaactatttttgcatcttcatttaaacacatttacttatgaaacagattatctctgctcttttcctttgtatgttgctctctggcgtaccgagattgcaggcgcaaaacattcagctacattatgatttcggacgttctttgtatgataaagatttgcaaggtcgcccgctgttcacctccactgtggagaagtttcatcctgatacttggggaagcacttatttctttgttgatatggattacacttccgagggtgtcgcttccgcttattgggaaatagcccgtgaactaaaattctggaaaggtcctttctctgcacatcttgaatataacggtggattatcgaaaggcatgtcttataaaaatgcttatctggcaggagctacctacacttttaataatgcttccttttccaaaggctttacgctgactgctatgtataagtatattcagaaacaccaatcgcccaacaacttccagctgacaggtacgtggtacgtgaatttctgccgcaatctgctcactttctccggctttgccgactggtggcgcgaagaaaccaactatggaaagactatctttctctccgaaccacaattctgggtaaacctaaacaaaatcaaaggagtaaataaaaatttcaatcttagtgttggctccgaagtcgaattgagtaataacttcggcggtcgtgatggcttttatgttatcccgacactcgctctgaaatggacgctgaactaaaaaacggattataagaaatagaattaaaaaaagtcggactaaaagaagccggacttcagaataatctctgtttatccctctgcggaacttaaaaaaatatatagaaaccctgttaaatgaaaactgatttaatctacggcgtagaagaccgtcccccttttaaagacgccttgtttgcggctttacaacatcttttggctattttcgtagcgatcattacacctccgcttatcatcgcaagtgccttgaaacttgatgtagaaaagacaagctttctggtttccatgtctctttttgcttcgggagtatctacctttatacaatgccgccgctttggtgtgataggagcaagactgctctgcatccagggaaccagtttttcttttatcggccctatcattgccacagggatggtaggcggattaccgttaattttcggttcctgtatggctgctgcgcctatcgaaatgattgtcagccgcacattcaaatatctgcgtaatattatcactccgctggtttccggtattgtcgtgctgcttatcggattgagtctgataaaggtaggtatcgtatcttgcggaggcggatatgcagctatggataatggtacgtttgctacgtgggaaaacctgtctattgcagcactggtacttcttagcgtcttgtttttcaaccgttgcgggaacaaatacctgcgtatgagttccattgtactcggactttgccttggctatggtttggcatttgctctgggaaaagtggatatgagtgcgttgaatgtggaaatgctgatgagttttaatattccccagccttttaaatatggtgttgatttcaatgtgtcttcttttatagccattggtctggtttacttgataactgccattgaagcaacaggtgatgtaactgccaactctatgatttccggacttcccattgaaggagattcctatttgaaacgggtttccggtggagtaatggcagatggattcaactcctttctcgccggtgtattcaactcttttccaaactccatctttgcacaaaacaacggtattatccaactgaccggagtagccagccgttatgttggttattatatcgcagcaatgctcgtccttttgggtttatttcccatcgtaggtgccgtattttccttaatgcccgatcctgtactgggcggtgcaaccttactaatgttcggcacagtagcagcggcgggaatccgtattgtctcctcacaagaaataggccgtaaagaaactttggtattagcagtcagcctctccttaggcttaggggtagaactaatgccggacgtattacaacaagccccggaagcaattcgaagtatcttctcttcagggattaccaccggaggcctaactgcaattattgcaaatatagtaatacgggtaaaagagtaggaaacaagtagtagaaacaagtattaagtaataagtattaccgaagccgctggtttatacttgataggcgttgattaatacttgttagttgatgcttgtcgattaatacttaatacctaattcttaatacttaaattactcattttatctgttgtgcggaaggggaaatcaggatactcgtaaagactgaaacgaggttcggtttctcctttcgtataattccagatagaagcatagtcttccggatcttctcccatcttggctaactggcgcaggtaagcagctagcgatttattctctacaatataaatctgccccatctgatcgataatcgggctatgatgacgagtaccgtcatgttcgaagcgtagaattcgttttccttcttcagttagtcccaccaactggaaagtcatgcttttaccgatagccggtaaattcaatacgctgcgatcagtggcaaggaaaggtaaatgatgctttctcatgaagcgtcttaattgcttggcaacatcctctttaggctcctcttctgttcctactttcgtctctaatatcttatataactcctccgcctgttccggtgtcatacggccataaatcttttcctcctgttgctcctgcattgaacgactgttgggtgcaaatactgcataattctcattgaatccctttaccgagaaagtgtaataacataccacccccaacgaattgagcacctgacgaagccgggtcgtatgccctctacgtgaagcagccaccgtatataccaactgattcgtaataatccatcccgcagaaagaatcttccggatcgcttctttagcttcaggagtaacctccagcggtgtctggaaatgagtctgtataataaactgtttcacaccgatagccgatgctttctccttgaattcccgcagaacatcaaccagcccgtcgttgatacgcatcggcaaataagccaacagacgtgaccccaaccgtacccgttgcaattccgcatatttctctccatccttgcgttcaagattcgccctttgtttgcgtgccgccatccgatacaccgcatccagaatattctgaagcgttttattttgactcatcagcgcatcgcctcctgtaataagaatatcccgcaattgcgtatcctcttcaaaataagccattaaccgacgcaacttacgatcccatgattccttcgggcgtaaagactcaaattcgaaattcaaccgctcgctctgaaaatcatacatacgctgacaagaagcacaaagtcctccgcaagcccgtcccatagtgtcaggaatgagaatagccacctccggataccgccgatgaatgttatgcccgtccggcaaaagccatcccgcagcattaggcttcccggcttctacaatatcctctttctcccacgcgcgaatatttccatacgtctccaccaaacgtggagaatacagaatataactccgaatagcctcgtcattatacccatatcccgttacattaagcaacgataaataataaggagttgcaaagaacggcatacccttcttccgggcacgataaagcaaatacatagtctctgacgaaagtgaatttcccaggaatcgattcaactcgcccggacttttcacagccattgccaaatgaaagcggaaatcgttccaccactcattgaccaacctgtatttttcttcataactcattccctcctcaaagtgaaaacgcaccgaaggcttcgacttcctgttttcaatcttctgaatcaacaagtgcaacatccgctccttattctcatcccgcacttcacgtacctcttcatccaatcccgtttcccaccggtcattcctacttttgatacgctgtggcgatggtaaaggcacaacctctcccttcaaccgtttaaacatctggaaaatttcaataaacaaatccgtcggtatctccatattttccaacgttcccgtcagaaactcataaagcaaccgaatcgtctgtactgacatatcctgtccagtagacagttcatggacattctgtccatcataatcgagtaagagtcgaatttgctccctcgcctcctccgcagcctcattttctatcctgcaaatttccaaaaaacgcagcatcccagccttgaactcttccacagaagagctcttatcagctatctccaccacttccggaatttcttgattatagatttgtttcaactgtgaaaaagtaagcgcaagcattttcttttgtttcataagcaatctctctattttttaattattataatatactaccataccgcatggtcctcctccggcctcgtctgcacggcgtcaagcgaaggttttattaccggcgttaagaagggcagactgtttgagcgaagcgagtttctaccctttagacgggaatgaaaccggagtagccgggcaggcgcagccttgattttttcttttgggtactttttcttttgtatcaagacaaaagaaaaaagtacataaagataacaaaaaaagcggaggtacaaaacccccgctttttctatcctattaatctttacgattttctaacatttaaagcgacttattttttcgtttccgtgtcgtcgttcttccgtttcggctccttcttggcaagaagaacaatattatacacataatccgtcatccactgttcagagtatcccaaacgctctttgtactggcgaacagtcgcagccgttttatgcacatcatcagccttccacactgtcttggtacaaacatcgtgtaccgttttctgtgtcataccatacaaagccttcttaaagatcgacggcatacgaaacttccactgcatcagatttcccatcaacatcatcagatcattggaaaatccctgatacatgaacaaataagattgaatatcattttgagtgcggcagttacgtttcacggaagagtcgatttccttaaagaagttctcgttcaacccataatcctgcatcagcattttgcgcgcagcagatttttcggccaatcccagtttaccgttttgagtaggaactttaaacaaacgtttgaagttagctacgtccggcaagaagcggatattagtgataccgaggtttgtggcgataactgactggaaatacacccgtgtcagtgatatgaaatcttctacattgccgactttcgtttcatcggattttttcttgaataaaccaaataagcccattgttatctctacaattttattatttacaatttactatttgagcgtgtggaaggtatataacataactaccatctgtcaatttgcgtgcaaaggtacaaaaacagttggttttcaccaacattccaagtccttttcgatgtccggcattgtctctttcttaaaaacagggctttggatgccagctttcttttgcgcgcggtaatcatttagcagacggatagcatattttccgaggaaaaggatagcgatcagattacagatagccattaacgccatcgtgacatctgccaggctccataccatatccaatgtggcaagtgaaccgaagagtaccataccacccaccaatatcctgtaaccatgaagtacccatttccggtgagtgataaaacggatattagcctcaccataataataattccccagaatactgctgaaagcaaaaaagaaaagagctacggcaacgaagatactgcccgaagaacctatttcgtttgtcaacgcctgttgagtcagctgcactccattagccgaaccatccagaggagccccactaaagaggatgataaaagccgtacaggtacatatcaataatgtatctgtaaataccgccaaagtctgtatcaacccttgttttacgggatggctgacatgagccgtggcagccgcattcggggccgaacccataccggcctcattgctgaaaagtcctctcttgatgccctgcattaatgccataccaactcctcctgccaatgcctgctcccaaccgaaagcatggctgacaatcagtgcgataacacccggtaaatgagtgatattgagtgcaacaataaccagtgccagccctacatatcccaaagccataacaggcacgataatactgctgacgcgggcaatgcgttgaatacctccaaagatgataagcaatgtcagcaaagtcagcacacctcccaatataatatgattgaacccaaaagcatgctctgccgcagcacagatcgtattactctgtacagaattgaaagcaaacccgaaagtaatgcttattaatacggcaaaaagcattcccatccacggttgtttcaaccctttcttcatataataagcaggtcctccgatgaacgaatcctttccgcgtattttgtataattgtcccaaagtagactctatgaaagcactcgaagcccctaacagtgcgatgacccacatccagaaaatagccccgggacctccgatggcaatggcagtagccactcccgcaagattccccgtacccacacggctggcgatagaaatagcgaatgcctgaaaagaagatacatgtttctctccctgttttcctttgccggcggattcgcttaacagcacgatcatttcccggatcatgcgaaattgtacaaagcgtgtccgtatgctgaaccagacagcacatcctaataacataataattagaatatacgtccaaagtatgtcattaatctcgttgataaaagtcatagttaagtattaagtataaagcattgtttgtggttattcgtcttttattcggaagtaaaatttatgattttcgaatacaggttccacaatatcataacgaacaaatttggcgagcagatgttcagcggcacgtcgtgaaagtccggtttgtcgacagtaacggttgagtgagagtaaagttccgtgctccagttgatcgagcaggagctgttcacgttcggtgtagcggatgagttctccacgggggctatcgctctgttgccatacacggagatgtatgggagttgccagaatattttcgtccttgatgcggagataggctaggggttttccggtttcgtccttggcgtaaaccggtttatgtggagtttcttcgatggttgccactaacacttgccgtccttccactatgtatgtttgcagagaatattccactttcggcacgcaataaagttgtgcggcggcttcaatcatatatttttcttcttcggagcgtactcctgcgattttaccattgtctttaacgccaataagtaatcgtcctccgtccgtgttggcaaaggccgaaagtgttttggctattttgcgtgcgtcggaaatttcgaatttaaagtcctgttgctggtgctctccttcagcaatcagtgcatgtatataatcggtatctgtaagcagtttcatggctacaaaggtaggtaaaaaaggtaaaaagccccttttttagatatttttcgaagattatttcaaaaaaaatattgattttatgcttttatttcgggaaacagtgtatttttgcggcacattattaacgaaaaaaataaaaggattatgaaagaattggtagaaaaggtagcagctctttatgctgacttctcaaaagatgctaacgcacagatcgaaaacggtaacaaagcagcaggaactcgcgctcgtaaagcttctttggaaatcgaaaaagcaatgaaagaattccgtaaagcatctttggaagcttctaaaaaataatttagaagactactaggatattgaaaaagagggcatatcgtgaagcgatatgccctctttttgttttaatgcggaatgactttttattgttttagtacggatagtggcaattatttatagcataaaaagcggttcgtttgggtgaatcgcttttttagaaaagagatgtctcccaagatgtaagtccgggctttttatatttttgtggttcttttaaatgatttatttgcaatttgtagggggcaaacttttttcttctatacgcatctcaaattaaatcgtatatttgcgaaaagaatcaagatcgggaatgatgaacgaaaacgtcttagctaaactgaagatacttgcagaatctgccaagtacgatgtttcctgttcttccagtggtacggtgcgttccaataagccgggaacgctgggaaacactgtgggaggatgggggatatgccacagttttgccgaggacggtcgatgtatctcgctattgaaaatcatgcttaccaattattgcatttacgattgtgcctattgcgtcaaccgtcgtagcaacgatcttccccgcgctaccttttccgtttcggaattggtggagctgacaatggaattctaccgtcgtaactatatcgaagggctgtttcttagctccggagtggtccgtaatccggactatacaatggagagacttgtgcgtgtagccaaagatttgcggcaagtgtaccgttttaacggttatatccatctcaagagtattcccggagccagtcgcgaattagtgaatgaagccggattgtatgccgatcgtcttagcgtcaacgtcgaaattcccaaagaagaaaatttgaaactgcttgcaccggaaaaagaccataaaagcgtatttgctccgatgaaatacattcaacaaggcgtgttggagagtaaagaagaacggcagaagtttcgccacgcaccgcgtttcgcacctgcgggacaaagtacccaggtgattgtgggagctacctccgaatcggataaagatattctttttctttcgtcggcactttatgggcgccccaccatgaaacgtgtctattactcgggctacgtttccgtgaatacgtatgataagcgccttccggcattgaaacagccgcctctggtacgtgaaaaccggctctatcaggctgactggttattgcgtttttatcaattcaaggtagatgaaattgtggatgattcctatccggatctcgatctcgaaatagacccgaaactttcgtgggctttgcgccatcccgaacagtttcctgttgacatcaataaggcagactacgaaatgttgctccgtgtgccgggagtaggggtgaagtcggcgaaactgattgttgcttcccgtcgtttttcgcggctgggattttatgaactgaagaagataggagtggtgatgaagaaagcgcaatatttcatcacttgcaaagaactgcctcttcagatgcagacggtgaacgaactttctccgcaacgagtgcgcagcttattgttgccgaaaccaaaaaagaaagtggatgaacgccagttgttgcttgattttggcgaataagaataatttacgattagacaatttactattcaaaagtgataccaagcgtaaatcgtctaatagtaaattcaattgtaaattgtctaatagtaacttaaatagtaaatcgtaaattgtctaatagtaaatatgtttagtgtttatatttacgataaaacctttgatggtctgctgacggctgtgttcgacgcctatttccgcaagactttccccgatgctttgctgtcggaaggagatgctttgcctttattttgtgatgagctgcatacggtagtgaccgatgaagaaaaggccgggcgtgtgtggcggggattacagaagaaagtttcctcttccgctttggggtgcctcacgcaaagttggctgtcggaacttccggaagtagggatgcttatttttcgttatatccgtaaagcgatcgacgcgccccggtccattgaaaccaattttggtgatccggacgttttgcaattggtgcaaatatggaagaaggtggatggcgaacgtgtgcacctgatgcagtttgtccgtttccagaaagctgccgacggtacattctttgccgctttcgaaccgcagtataatgcgctcccgctgacggttcaccatttcaaagaccgttttgccgatcagaagtggattatttacgacatgaaacgccgttacggattttattatgacttgcaggaggtgacgactatctcgtttgatgatgacagtcgtgaatcccatttgattacggggatgctggacgaaagtctgatggacaaggatgagaagcttttccaacaactttggaagacatatttcaaggccatttgtatcaaagaacgcatgaatccgaggaagcacaggcaggatatgcctgtacgttattggaagtatctgacggaaaagcaaaagtagatttccattttgggagaggagcgaaagtctgactattcaattcgctgcaccgttacatccggaaattcctgtatcagcgaaagcagatgcccttcatcattatttcgtttcgacttgataaccatcgtaacctgataatattctgtttcacccgtgtgttgcgtttccatctcgtaagagactatcaggtagtctttagagttgaatctgtccgctatctgtttcagtatgtctttgttgggagttgagaaagaaaccatcgagcttttcattccgatgcttttaaatagatagctaagtagttccagtccgacgagggttaacaccgtggcggcaataccgatggtgtacattcctgcacctaccgccaagccgatacctgctgttgcccagattcctgcggcggtagtcaatccgcgtacaatctgtttttgaaagatgatggttcctgcaccgataaatccgataccgctgacaacctgtgccgccacccgactgggatcgagtgtgacactactttcttttataatttcctgaaatccgtattgggaaacaatcataatcaaagcactacctagcgacacgagaaaatgagtgcggtatccggcttctttggcacggtattcacgatccagtccaatgatggttcccagtattccggcgaccaataaacggattacaaaatccatattcaacatcatgtgttcaatctcctttctgttttttattgtttgtggaaaaatgcttagaaccataaatatacaattatttcccctttttgtatcaatcatttagtaatatttgaacgtatccaattcattttatcgtatattcgcagattcaaataaatgtttaatcccgcgaccgagcaaataatgaagaaaagaattttttatataatcagctttctggtgatcttctgtatggaggtgttgatagctttgtatgtgcgcgaccgtttcatacgtccctatgtcggagatatgctggttgtagtgctggtatatagctttgtacgtatctttctgccgacggggattccgcggatgccgttttatgtctttctttttgcctgttttgtagaagtcttgcaatacttccagctggtggaaacattgggtgtcacgaaccgcgtagcccgaattgtgctgggttctacgttcgattggggagatattgcctgctatgctgtgggatgcgttttcattgtcttattcgagcatttcgtccggcgtagatcgtagaggatttatttctcttccgctttggtttcggatgggtttaggctgtggccgcaatatttgcaaaactctgcattatcttcgtgtccggagcgatggcagttgggacattctttgtctctcctgcgtttatactctttcatcatggaggcagatacgatacctgtgggtacggcaataatcgtgtaaccgatcagcatgacacaggcggaaaggaattttccgaggccggtggcgggagtaatatctccataacctacggtagtcatggtgacgatagcccaatagatgctgttcgggatattgttgaactgggagttgggttgcgttccttcaatcatatacattagcgttccgatggaagtcaccagaatgacgacaaacaggaagaacactgcaatcttcttactactttcacgcaaggcagtgagcagccgttccccctcattcagaaagttgaaaagcttgaagacgcggaacacacgtatcaggcggaaggcacggatgatgagtagatagcgggcgcccggaaagagcagaccgatgtaaagaggcaatgtggccagtaagtctacgataccgaaaaagctgaatatgtatttccggggacggggtgaacagtagattctcgtcaggtattcgaaagtaaagaagccggtgaaaaggaattccataatgacgaacggagtcgtcagataggtgggaagtcctttcaggctttcgatgatgacgagcaatacgctgaccagaatacaggcgataagaatcacgtcgaacaattttccggcaggggtgtccgattcgaagatgatgacgtataactttcgtttcagtttctcgtcatgcaaaaaacgatggattctttctttcagtttcatatcaatagtgtttggccggaattaaagaaaaagcctttttagtcgatgacccactgtttattgtaggcaacggtcttttgcgggttgtaatacattccctcttgtgtaggaatatagagaatgtatgtctttccggtcttgtttttcaatgaagtgtcgcgcagccaggggttggcatcacgaagttgggcataggtgattccctgtgattttgcgtagtcgttcagatcgtcgatagaagtgttgacggttacctctttataaggaataggcggatacagatgttcccgtttcaagaggaatccgtaacgttgcgggttattgaatatctctttggctgccagcaggcggaacatgtagcgggaagtttcctctaccagccataagtccatggcatgacttgccaactgcttttcaagttgggaggagatacgtccctgtccggcgttataggcggcggagacagccatccaatcgccatatttggcatacgcctgtttgaagtatttgcaggcggcaacggttgctttttcaatatgatagcgttcgtctacgttatcgttcacttccagcccgaattcccgtccggtggcaggcataaattgccatagacctgctgctcctgccggagagcgtgcgatgttattcagattgctctcgatgaccatcaggtatttgaagtcgtcggggataccgtttgctttcagtatcggttcgatgatggggaagtaacggttggcgcgcttgattaatagcatggtggtggagtgcatataggtgaaggccatcatctcgcggtccatccgttcgcggcggtcatagcgccggaggtcgatcgtttccccgtcgaaggtgacctgtgcgggaacagtaggcggagtgacacaataaggcacttccgatttggcggaatgttgttcgttcacttggctgctgcctgtcaatattgggatggaagcaccgatgcaaaatactaatataagtgtaagaatatagttgattttcatttgtcttttcattttataacctttttggatgcttcaatgtttacgtctatcttgcaaagataacctcattttgcttttttcaaagaacttttcttgcattttatacgtttttctaatagagttaaaataaacaacgaatcaagatgaatatagcaatgaccggagctaccggatatataggtaaacatctttctaattatcttacagaaaagggcggacatcggatcattcctctaggaaggtcgatgtttcgcgaaggtatgtccggttatttgattcagacactgacccattgtgatgttgtcatcaacctggcaggtgcacctatcaataaacgttggacaccggaatataaacaggagcttttcaacagtcgtattgttgtaaccaatcgtattatccgcgctttgaacgcagtcaaaacgaaaccgaaactgatgatttcggcttctgccgtaggttattatccttcggaagcggaggtggacgaatatacccgtacccgtggagaaggttttctgtccgatctttgctatgcgtgggaaaaagaggcgaaacactgtcccgaacctacaaggctcgttattacacgcttcggcgtagtgctttctccggacgggggagcgatgcagcagatgcttcgccctttgcaagccaccaagatagccaccgccatcggtcccggtacacaggtttttccgtggatatcgatacgggatctttgccgtgcaatggagttctttatcactcacgaagagacacatggggtatataacctggttgctccgcagcagatctcgcaatatgctttcacccgtgcgatgggaaaggcttatcgggcatggacaacgatggtagctccgcaacgaattttccgtatcttatatggtgaagcggcatctttcctgactgctggccagagagttcgctcaacgcgtcttacggaggcgggatttcatttctccattcccaatgtcggacgtcttttcagaggtacggaccatagtacggttacctctctcgatttgcaccggtatatgggactttggtatgaaatagcccgctacgagaatcgttttgaatacggacttgtagacgtcacggctacttacacgctccgtcccgacggcatgattcgtgtggagaaccggggatgcaaacgtaattctccttacgacatctgcaagactgccaacggacacgccaaaatacccgatcccacacagccgggcaaactgaaagtgtctttcttccttagtttctattctgattattatgtcttggaactggatgaagagaattacaattatgccctggtaggcagcagtactgataaatatctctggatactaagccgtacaccccaactgccggaagaaatcaagaagaaactcgtcaccgctgccgaacgtcgtggatacgatacgagccagttgaagtggatcgagcaactctgatcgcaggcatatacatatatcagtttatgcaatccgcacctaataaataatataagattgtttagcgaaagtatttaacggacgataaaccaactttaaaacaacagaaattatggattacgaaattattcatcagcccgaacaaaaattgttcaagacagaagtagacggtcgcaccgcctttgtacaatatcgcctgataggtgattctcttgatattatccacacaattgtgccacaacccattgaagggcgggggattgccgctgctttggtaaaagctgcttacgcctatgcattagctaacgggatgaagccgaaagcaacgtgctcttatgcagtgaagtggttggaaagacacccggaaataaatggttaaatactcgcttttgattcgtcggaaaaggaaataatattatctttgtaattggaaatcaatgaagaaaaatagtgttatgataaaagaaggtgaaaaggtaaaagtggatcctagattaacgggactcgatgaatggatagagggtacagtaattgatattgaacataatccgttcaaaggcttagttatagcgattcgtgataaatttaaccgtattttctttggtgagcagaaatattttattcctgtaaatgaggataatgtatgtatgcaatagcctttgatatggtcattacagacctacgtgccaattatggagagccttataacaatgcctattttgaaataaataaagtgttgcgtcagtatgagttttataatacgcagggtagtgtatatctaacagagaaaactgatatggcaaatctttttcgtgcaattgacgcattgaaacgtattccttggtttcaggcgtcagttcgtgatcttcgtgcgtttcgtgtagaagactggtcgaactttacggattttataaaagaaaataagtagataagctttcaggtctgaatatgtattcatgcctgaaagctccttttatttctcaattactgtttccacctcttcaactgtggaaagtactccttcatcgttttccgtgcttcctccactgtgtatttcacttccgagtctttattgaactcatccagataattcagattaagctcgatcatctcgtccatggtacactctttcgtgaaatgtccgtccgcatagcaatagtggcaataatcttcgttcttgctaccgtccgtttcttttccaaaagttgagtcgtctatcggcataccgcaactttgacaaaatttttgttccatctttttttgttagattataagtttatgttacaagacaaatgtaagtaaaaatattggaaaagaagtaatccggtcttgctatttattcatttatttctttcctggtttgcttttggtgttaattggttttcacgggcagccgtttccacatccaacggggaatcattttccagaaaaagaccagtatccggtagcgccagtcgatcactactatccgttgtttccgctccagtgaccaggcgatgtgacgtcccactttcgctgcatccatcaatagcggataatgtttcccgtcgttgagcaagtcggtggcaacaaatccgggacggatatcagtaaaacggatattcagtttttgtaaatatgaaagttgttcgagagcatctatgtaagtgttctggaagcgtttggtggcagagtaggcaggagccactccaagtcctttcgttcccgcgatggagctgatgactgccaggtggccgcctccgcttttcctgaaatagatgaaagcggtatccaccatgcggataaatccctctacattcgtgtatgctgtgttcagctccacctccatgttcagattcgtattctggaaaccgatgcccgagctaagaagaaacaaatccatgccgcccaccttgtcgatgagcatattcaatttctcgcctgcatcttcctgggttacgtccaacgtttgaatttgaatctgatccggtgctgcccgttgtaggttttcgagagcagattgccgtctgccggctactccgatttgccatccatccagtaacagacattttgcaacttcttgtccgatgccggaggtagcgccaatgataatggcttttttcattactgatttttttagtaagttataggttcaataaatgtcgtatggcctgccagggtgcataaagcaacatcctcggtccggagaaacgcatcacctgtcgcattcgttcgcgcatgacgggtttgtaacaatgtacggtgcattccttgcatgcactcttcttctctccaaacggacaatggtcgagacgtgcgtgggcatagcggagcaactcttcacagtcggcacaaagaattgtatttttttcttttttccggcaatagaggcggatcatcaactctaccgttttcttttcgtgcgcaatgcgtgatgctttcatctctttcttttttacactttggaatgacaaagatagcgaagattatgcagaaatgcaggcgtattctgttaaaatacaccttcttcttttttctattttgaaaagcaccctttcattttggtagggtatttagagattacttattcaaaatgaaaaaaatattgcattgattacaagctaattatcagaatccttttcattttggcatactcttggctatgaggggaacatacaaaatgattcatgagttatggaagagtacatttcagataacagtctgtatattcggagtaagaataatagcatgattaaccggaagatgatagggcgcgtgttgggtatgttgctatttatcgaattggggatgttcttactttgtgccggagtgtcggctggttacggggaaagtgattataaatactttctttacacctgtatcatcaatgctgtggtaggcggattgttactgctctacggacggggagcggagaataagatgagccggagagacggatattgtgtggtcactctttcatgggtgttttttacctttttcggcatgcttcctttttattttagcggaagcattgatacgataaccaatgcctttttcgaaaccatgtccgggtttaccactacaggagctactattctcgatgatattgaatccctttcccacggtatgcttttctggcgaagcctgacgcagtggatcggtggtttggggattgtgtttttcacgattgccattcttcctatctttaccacgggaggagtgcaactcttctctgctgaatctacgggagtgacgcacgaccgtacccatccgaaaatcaatgtcatggccaagtggttgtggacaatttatctggtattgacagtttcggaaactgtcttattgatgtttgggggcatgagcttgtttgatgccatttgccagtcgtttgccactactgctacgggcggatattctaccaagcagaacagtatatcttactggaattctccgtatatagaatatgtggtggctatctttatgattgtttccagtatcaacttctctttgtttctgatgtgtttgaaaggaaaagtcggtcgtttattcaaagatgaagagttacactggtttctggcgtcagtgggtatcttgacttttcttatcacgttggcgctcgtctttcaaaatcattatgactgggaactggctttccggaaagcattgttccaggtgtctacggtgcatacttcctgcggttttgctacggatgattataatatgtggcctcctttcacgtggttactgttgttcattgcgatgctttcgggagggtgtacgggttctaccagtggaggtatcaagaatatgcggttgctgattgtggcgcgtgccatccggaatgagttcaaacatctgctccacccgaatgccgtgcttcccgtacgtatcaataagcagacggtgtcttcttctatcgtaactaccgtattgattttctttgctttttatctggttctgatcctgattgggtggacggctcttttgtttttgggagttggcttttccgagtccgtcagtacggttatttcgagtataggcaatgtcggtccgggattgggaacttgcgggcctgcatattcgtggaattctttacctgatctggcaaagtggatactttcttttctgatgctggtgggacgtctggaattgtttagtgtactcctgttgttttatccgggattctggaagaatagataaactgtaaatcatgaacgggcttctgaaacatcgttggaagggtttgtggttgacggaaacaatctgtatctttgcagcatgaaaaagttattgtgtccgcaatgcaagattgcagctatgtatgtgaagaatgaacagggtgacaggctgctggtttatgtgctcgaagatggtgaagttgttcccaaatatccggaagattcgatggaggggttcgatttgacagaagtcttctgcctgggatgctcgtggcatggttcacctaaacggttggtgaaacgatagaccgggagactcatgctctcatactgatttttttgatttatgtcaactaaaagaggaacgcaaatcaagaactaattcattgaattttccgtatctttgcatccgattttagaacatagacgtatggcaacttctaaagaaatgacggcagggccggcattacctctcattttaaagtttacgctgccgcttttactcggcaatctgttgcaacaaacgtattcgcttgttgatgctgcaattgtaggaaagtttttaggaattaacgcgttagcttctgttggagctagcacatcggtggtgtttcttattctcgggttctgcaatggatgttgcggaggtttcggaatacccgttgcgcagaagtttggggcgcgggattacagtacgatgcgcagttatgtggccgttagtctgaaactggctgcgggaatgtctgtggtgattgctcttctcacctgtattttatgtgaggatattcttcggatcatgcgtacgccggagaatattttcgaaggggcgtatgcttatttgcttgtcacgtttattggtgtgccgtgtactttcttctataatcttctttcgagcattatccgtgcgttgggagacagtaagacgcctttttggtttctgctgtttgcggctgttctgaatatcattcttgatttgttctgtattttggtacttggctggggagtggcgggagctgctattgctactgtcttttcgcaaggattgtcggctgttctctgctacatttatatgtaccggaagtttgaaatattgcaaggtactccgaaagaacgccggttccagtcgaaactggctaagacactgctttacattggtgtgcctatgggattgcagttttctatcacggctatcggcagcatcatgcttcagagtgcgaataatgcattgggaacagcgtgtgtggcagcttttacgtctgctatgcgcatcaagatgttctttatctgcacgttcgagagtctgggaattgcgatggctacgtatagcggacagaattatggggcaggaaaaccggagcgtgtctggttgggaattaaggcgagtgctttgatgatgatcgtttatgcggcatttacattcgttcttctgatggtgggagctaaatattttgcattgatctttgtagatccgtcggaaacggaaattctgttggataccgagttattcctgcatatctcctgtatgttcttcccgatgcttggtttgttgtgtatcttgcgttataccattcagggagtaggctttaccaatcttgccatgttctccggagtggcggagatgattgctcgtattcttgtcagtctctatgccgtaccggtattcggttttattgctgtctgctacggtgatccgatggcttggatagcggcagacttattcctcgtgccggcctttatttacgtttatcgcaggttgaagaagcaggtatttacgaattcgactgtacagcagactgttgcataattgtcttttttcaggctaggaatatttctttgtttgaatttagaaatcggcctttttctgtatacggaaaatgtctccgtatatgggatggcgaaactctatatattcggcatggaggtatagtctgtctgctttctttccgtagagttcgtctccaagtatggggcatcccaagccttccggatgggcggcgtgtactcgtaactgatgtgtgcgtccggtcaacggatagaagacaatccgggtgtattttcttggctcattgatactcctttctgattcatcaatgatcttttctgattcactgataatcttgtattctgtaatcgcctcttttccgtattctttactaacgatttgtcggggacggtcgaggggatttaaacagagagggagttcgatccttcctgttctttctgatagtactattccatccagcacagccacatagcgtttcttgatacttctgtttgcgaattgtgcctgtaaatcctgatgtaccttttttgttttggcaacgagtaataatcctgaagtagccatatcgagccggtgtacaatcataggaccggtagcttcgggatattttttcttcaaacgatgatagactgaatctctgtcctctgcttttcccggaacggacaacatccctgccggtttattgactaccagtaaccattcatcctcaaacacgatttctagttcttcctcttcatgaacaggattcagcagtggattttcgtctatctccaatccttgcagcatgtgttgcagaatcggttcgcatttccctttgcaggaaggataataatatccgtgatgccggatttcgtttttaggagagtcgccccaccagaattcagccatagccaatggctttaattgatgaagatacgcatattgcaataacttaggcaaagcacattcacccgcaccggcaggaggaactttctgaaccgtttgctcaaaaatagtatataagtctttcacctctccttgggcgtttagcatccggaactgctcgaataattttctttgtaaagctgccgaacgttcttttcgttcggttttcagtcgttctatttcaatatcgaagtgcctgacttccgtttcgagctcttccaatcgtttcttccattccttttccagtcgtttgtattccgccttttggtattggctttcccgaatcagggaggcttgttcttcttcggaaagctccggagatgactggcggcgaatctctctcgcctcctttgccattttaagctccgcttttgcttgattcaaaacagctttagcctgttccgtttctatcttccatttctcttttgaaccgagataagaactactgttttccaattcacgaatacggatattaatggcagaaatctgttcttcttcgattttgaagaatccctccggttgtaataggtcataaacaggaggaacgaaataaggatgcagattctttccggccagattgccggagaaagctgcaagataaccaatctgattttcttcgttgtttgttattccgttgtccgtttgcacaatcaacactccaaacatctttccggaagccaattcctcttgccattctttccggcttgcaatatatgctttcacttcttccgcagccaacacacacaatggatggggtgtataatggaaaggataagtgaatttttccggcaacgcaaggtaagaaacgggtttcttgaaaaaatgtatcatcggtttatatatatgaatgaatgtgattacctttgcaaaagtaacgtaaatccgcgaattttattctatatttgtttgagagtttgagtgagataacgtggacgtttgaatgaaattgtatggataggatagaagaaaaaccaaaatttgcctttcttggcaacagtcacatggctttttgggcactggatatctatttcccacaatgggaatgtctgaactatggtgctcccggtgaagggctggcctatgtggagtcttttgcggtagacacttccgattgccaggtcgttgttcaattcggaaccaatgatatttatcagttgaacgatgaaaatatagatgaatatgtagagcgttatgtaaaagcggttcttgccgtcccttcactgaaaacatatcttttctgtatttttccgcgtaatgattatgatgattacagtacggctgtgaataaatttatccagatccttaaccggaagatacacgaaaaattgcagggaacagatattgtctatctggacgtattcaatcgtttattgcaggatggcaggctgaatccggagttgactctcgacgatttacatttgaatggtaaggggtacagtattctgacagaagcactgaaacaggcttccagtttgtaaaacatacctaaatacttcattccttgcttttatttataaatttggtggcatatcagtttatttttcctatttttgtccccaatttaatagtaaataacccccataaaaacgataagacttatggaaaaagtaattatcaattcgtacgaagaattcgaaaaactagtaggccaacagataggtgtttccgattatgtggaactctcgcaggaacgtatcaatctttttgctgatgcaacgctggatcatcaatggattcatgtagatacggaacgtgcgaaagtagatagcccttatcatagcacgattgctcatggctacctgacattgtctatgcttccttatttgtggaatcagattatccaggtgaataacctgaaaatgatgattaactacggtatggacaaaatgaaattcggtcaggctgtattgtcaggacagagcatccgtctggtgactactttgcactcgctgactaatctgcgtggtgtggcaaaagcggaaatcaagtttgctatcgaaataaaagaccaaccaaagaaggcgctggaaggaattgctgtattcctttattatttcaattaatggcaagctgttaaagaaacagattttatccccggaaatgatcgaaatacgtctcaaaagttagatacaaaaacttttgggatgtgcttcagatggatcgtttccggggataattttatccttttactcccataaatctgaacggctgtgccggtttaaactctttcgttgcatttccatgataagtttcaccgttggcgatagataatttgagtaccggagctccttctgacaagtctgtttcccgtaagtttacccagaatgtattaggtgtcagacttgattcgaagaagtagagcaaattcttactatccgataccgttctccattgtgtggtggaaatctccggaaattcgggagtagagatgccataaggaacagaagtgtttcggataacgctgaatacgcttgctatggctattctcacatcatctgtttggggcagggcattgatataaaaactggctcttgcaaaacggtcggatggacggttggttccgggcaggaaactcaatccgcctattgatttccagtactcgttcagtgccagttgcttgttgtaggttggggagttggtcatcactttgtattccttgctgtggtaaacagtcagctttccacccgtatattcgaatatcgcacaatcgcccgttgcgtcggaaatagataaatgcaaggttgccaggcgggaaccatccggcatcaggtccgataccacttggaaagtgttttcatcaatgaaagcgacagcctcgtctacggtggcgaagttatccagcatatattgcacccatgcagtaatggcaagtcccggtttactttgatctctgaccggatactccgtttcgggcaaccataacagattggcaaccaaccctttttcattcatcccgtctgtactggcaatctcgaaagccgaagtcaccacgctgccatacttggacgtccattgcagggagttggctcccgtttctccatttctttccatacctttgggaaatacccaaagattgctgtgcatttctgttttccagtccatagaccggccggttaccaccattccattttttcccgaataaacgactcttgtacacataattttaatttctagttaaaggtttattataagctgctttcacgaggtattcaaccccgatgcggattcatctcgcaaaagcatattctcaaaacaataacgtttcatttatgttttagatacatatcagatattaataaagtatcaaaaaacaggtattatgtcattaagtaatcttctcatcatattttcgtcatcgtttatggcgctgtttccggtgataaatcctttggggaatggttttgtcgtcaatggattctttacagacctcgatcctcaacaacggaaagcagctattcagaagctgacgctcaattttataatgatcggtgtagggacattggtgatagggcatctgtttctattgattttcggtttggctattcctgttattcagttgggaggtggaatgctgatttgtaaaacggcaatggagctgttgggcgattcgggttcgtctgataaagaagaaaccagtaagaatgtagacggcttcagatggaaaaacatcgagcagaagatattttatcccatcacgtttcctatcagtatcgggccgggcagtatatcggttatctttactttgatggcgtctgccagtgttaaaggcaaattgttgcaaactgggattaattatttggtcattgcgcttgtcattatttgtatggcggccatcttttatgtattcctttcacaaggacagaggtttattcagaggttgggaccggtgggaaatcaaattattaataagcttgttgcttttttcactttctgcatcggtattcagatttcggtgacgggtatatcccagatattccatctgaatatactctaattgaacggtgagataaaagcgatagaaattatctgtttttctttgctttcatggctttcagggtgttttttcgtacggaacggatagcgggaaccagtaagtcgggctccatgatttccagtattgtgcgtaattcctgttgcagttccgggatggaacgtgtcagttgataagccagtttcatgcagagcgattgcacgcccggtggttcctcgcgggatatcatgcgttccatgcagaaatcaaggaaatccactcgtggcggatcggcggcaggttgctggcatatcaggttcaggatcattctccgttttcccgagtgtgggcaggtcatggcagcgtcaatcaattcttcttgtttccggctcaaccattctacatctgccttggagaaatgactacatacccacaatgcctgataggaaacaatgtggtctttgtcgaatatcagctggtagacttcttctctaagacgctcgtcgtcctgtatgaaatggagtacttctctgatatcttcaatgtgtacacgttcggataatctggcacgtaagttcatgtttctttcgtttttgggaaattaatctctattagtggaatcagcttccggcagttgcaaatgaagaatggggaaaggtttacccatgctgtccgtttcatctctgccgatgacttggaatcccaaatggagatagaactgaagtgctttttcattctgctcgtttacgtccaccttatccatatgttttttgtctcttgcatattccattaatcgtttgccatatccttttccctgttcgtcggggtgtacgaataacatttcgatcagttcgtcgctcaatcccatgaaggcggcaatctttccgttggcattccggatgacaaaaagttcaacagcgggtagataatgcttccgcaccagtggtttataaaattggatatgctcttccgtcaggaaatcatgcgtgtggcgaacggacatttcccatacatggaggatttcatcatagtcttccggagtaggttgggagatgccgggcaggtagtagcactggtggtcgtagatgtttccgttgtaagtcagttctgcctgatgaagtgtaccttcatagatgaaaccgttctttttcagtactttctgcgaacgtttattgtgcggataacaggtagctgtgatgaggctaagccgcaattcttcaaagccatagttgaggacatcctgcactgcttcggtcatgtatcctttgccccaataagattcgtcgagccagtaacccaacattctcacttgcggattttcgcgtttaggatcggggataattcctacggaaccgattagctgttttgtatcttttagtatcactgcccatatcccctcctgattgataaatgtggaatgaagtatccggcgggattcatccaatgtgcgatggggcggccatccagcattgtttcccagattcgggttctggcagcaagcgaaaaatgtttctgcatctctttcttcgaaagggcggagaaataaacgttctgtatggagcgtcacggggggaatattttctatgtcagttttctgtcttgctttgtttttcgattcgtttgctgttttccgatatacgcactcaatccggtttccgtcaggatcgaggactacactttcaaagtatccgtctcccgaagtgcgcggtttaccggcgatggtatatccttccgaacgcatttgttcggtgaagcgtaatacttcttcctggctggggaaggtgaaagcaaagtgtgtcagtccaaccctgttttcttcaatgggagtgttctgtacatctgtacggctcatcagttccaagtctgttccctctccaaaagagataaaataggactcgaatcctttcttgggattgatatatttttcgttgctttttcctccgaagaagcggacatagaactcttttagttcttccagacgaaaagtccagatagcgatatgatgtagtttcatataaatgaattttctaatttctattactttgtttctatcttaatgctgcattacatattcgtaaacgatacgggaaatatcagcgataattttactgttcgcctgattattttcttcagaatccttcacgaagacagctatactataagtacgtccaccgggcaaaagtacgaaaccgatgtcattacaaccgatttgttgtcctttcgcattaagatctcccgttccggttttatgacctacggttacttttttgtcgagcaatggagcaaccagacggtcttgtccggtttgacattctaccattgtttgaaatatgaagtctttgtacacgttgggaaacaatggcttcttacggaatatttccactaattcggctgcggctaacggagtagtccagttttcataacataggttcaagtcttcgtgcatggcagtttccgtaccggcaatggcacattcccgaattccctgtgaatggatatacttgtttacggcatccggacctccctgataatcaaaaagaatatcgcaggcattgttgtcactctgttggagtgtatattttagcaggtcggcaatactcatttcaattccgccctgcggatatttatcccgtagcggactgtaagtatccggctttaaatccgattttttaataggtaaccgggtttccagcgattgcttctgctttcccatataatctgccaatgctaatgcctgatgaaacttgaatacgctcatcagtggatagtgaatatcattattgacagttatcgtatctttcccatcaatgatgacggctattcctatttcggccttctttcccttgatggcttctttcaactgtgtctcaagttgagtttgtcgggcaaacaggagggtggggactaaacaaagaaatactatgaatgaacgcataatcaatttctcttttaacgggttactaattctctattgaaatcatattttctgttgaagtcacaaaggtataaatagtaattgcctttgcaaattcttacttgaaatttatagttgtataatgaatatgtagagttagtttcttaatttttgtagtaataaaaatattgatacagaaattaggtttactatttcatttatgttatttttgtgatatcttattactgaaatatatactatgtaaatatttggaagtagtaacacaccattaaaagacaaaactaatatgagcacttttcgttctatagaagaacttgtcaaaagtctggaccgggagaaagaactcttgaaagaaatgtttgctaaacggaaatctctttcgttccgttatgattatgcgcttgaaatgacggagtacaaagaagagcgtatccgctatctgatagactatggagtcatccgggacactggcgacttccttgaaatggaggatatttatctgaaattctttgaagatgtgctcgaagtaaatgaagaaatcaatgtatctttcgtgcaggattacctgacacgactgaatgaaaacattgactattacttgaaagagaataacgaacaacgtaaatacaactaccagcgtgaagtgaaacgctgcctgaaaaacatcgctctgactacagtccgcaatgtgatggatctgaaaagaaacatggataatacctataagaacgaacctaattataagataaaaaagaccaaacttgtccgcctcgatgagaaacggaataatattgctctgctgattcgtaaaagtgaggaattgatagactacggacagcctgttttcttccgggtggcgatggacgtacaaatgcggaatgtagtaagtgacgtaaaacttcagctaaatgactcgtatcataatctgattgaaatccagaaacaaatcattcattatctgaatctgatagattatcagaaccgtatctttgagaaagtaaagaagttgaagtacttgaaagaccagttcttgttggaagaacatacaagtatccgttctgttgccgcacaaaaaaatcctgtctggatggagccgcaggtcggttatcgcatcaagctttccattgataatctacggacttccgatgaggcttttcagattttgaagaaacttgtcgcgcggcagagaaattctccgaaaggaatgaaacaactggcagatgccattccggaaggatacctggatgggcagtcgcaaatgatagataccgtaaacttgcaggaggtgcataattcatttatggcgtccagcacccatctgttctcttttgtgatgaactatcgctaccggaaagaggtgacacgtggagagaaattaatctttttctgccaactggcgtcacagtatgccgacgaacttcgctttacggatacttatgaaatctccgacgaagtggaataccctttaatatatgccaaataatgtatgctgaatactaaaaacagatgaccatgaaatacactgaagagatatttaatatacttagcaaagggggatttatttcttccaatagtgtctctacccaagtgaaacgcttgtatgatgccattgaggaagatttgcccgattattatgattattacaaaggtatcggcttctatctggaaggcggtgacggttattactactttactcgcaaggaatcgaaagtcgacttagaacgtaaactggaagcaattcagaagtggattgattacttgagtttcctgaaaacctatcattcggcattcggcccgggctttctgtttcgtgctgctgatattgagattcagataggatgcgatatcgaactgaaagaaaaggcaactaaactgttttcggataagaagaaatatgatgaagtagtcggcaaactgctgaaagaactggagagtataggactgatagagaaagaaaacgaacttgacgggacgtataaagtattgtcggctttccattatatggaggacttggttgattgtatcacaatttcagaggaggtgcaagatgagatacctgaataagattatttttctgaacagtgcccatattccgtatgcggaagtgaagttggatgggaacgtacattttataggtacgcaaggtgtcggtaagagtacgctgcttcgtgccatcctcttcttttacaatgctgacaaactaagactgggtattccgaaggagaagaaaagcttcgatgctttttactttccatacgccaattcttacattatctatgaggtgatgcgggagaatggggcgtattgtgtggtagctgccaaatcccagggacgggtgtttttccgttttattgatgcgccattccaacaggactggtttattgacgagcataatgtggtacattccgaatggggacgtatccgcgaacacatcggcgcgaagattcagattactgcacaagtgactagctatgagatgtatcgggacatcatcttcggtaataaccgtaagcatgaaatgataccctaccgcaagtttgccattgtggaaagtgcaaaatatcagaatattccccgtaccatacagaacgtctttttaaattccaaactggatgctgactttataaaagataccattatccgttcgatgagtgatgaggatatttctgtcgatttggacttctatcgtagccagataaaggaattcgagcaagaatacagggacgtgatgctttggtttacaaagaacaagaatggagaagtgcctgtccggaagatggcggagaaagtaatgaacgcctatcgtgacttgatttatactcaaaagcagattggtgaagggcgtgcggagcttaactttgcggagaaacaggctttgcatgaaattccgttagtgaaggaagagcaggctaaagccgagacggaacgtggacggttgctgcggcttatgggtgaactgcaacaaaagtacaccaatgagcgtgatggcttgattagggatataggtataataaacgatttgctcaaaaagatacgtgagaaacgtctgcattacgagcagatgcagattgaagaaatcatcaaacgggtatcttgcgaagaattattggttcaggaactagaacaagtccggaatatgaaatcggaactgacaagggcttatgaggatgtattgagcaagtaccgattgctgtttgagaaactggaagctgatttccgtacttttgagaatagccagcaagcacggataaatgctcggaatgcggagatttccggcaagcaggaggaattgatgcaacaacttcgtgtggaagaagagaaagtaagggcaacgcaagaagagaaagtgcagactgtggataatcgtatccggcagttgcgcgatgaacaggcacagtgtaacctgaaacttcaaaaggtgaaatacgaacatccccatcaaaaggaaatgtctgattgtgaagatggtatcaacgaactgcgcaaaaaggatagggaactggaacttggcatccgtcagcagcaaggagaaataaagcagttgagacaggagtgtgaatggaaagtgaaagaattgaaatgggaatttcaggcaaagatggagaccgttcgtaaagagcggagtgcgattgaagaacagttgcaaacattggatgccttgattgagaaacgaaaaggttcgttgtgcgaatggttggagaagaataaaccggattggcaggagacgataggcaaggtggcggatgaggaactggtgctgtataacaatgaactgcaacctcaattagtgaataaggaagctactttgttcggcgtttcactcaatctgacagccatcgagcgttctgtccgcactcccgaggaaatgaagcaggagcgcgacaggcaacaagcagcccggcaactctgtatcgaccgtctcacccgactgacggaaaaagagggggaagctgtttcttctttggagaagaagtattcgaagcaaatacatagtattttggaagaacaacatctgatggaagccgagcgaatgcagattcctgtaaaattgaagaatttgcgggctgattacgcttcatggaagacgaaggaggaggaatggaaaagaggttgtgtcgaagaattacaggcgcaactgaatgatatcggtcatcgtctttatgtggcggaaggcgagaaggagaagcatttggcggaacgggaaaaactgctgaaagcctgccggaaagtgtataatgatagtcggactgagcttcgaaaggaactggaagagttcagtgccggtgttcggcaagagatagagcggatgaaacagcaaactgaggagcggaaaaaggaattgaagcaggcgcaggagaatgaattgaatggaaagggtgctgatacggtcactatccgcaagtatgatgacaggcttgccgaaataaataaagaattggattatattggcaaatcccgttcgcaagttctttattatgaaaaagacaaagaggaactgtttgataaagaacctgctacgcgaagccggaagaaggaattggatgcgaagttggttgcattgaacgaacgtttcgatctgaaaaaggaaaagttgcaagttcagaaaaaaggggtggacgagcacctcgaccgaattagcaaggaattgcgcttattggaggacgggttgaataaagtggatatgttccggaaagatgaaattttctgtccgccttctgtgacggaaataggagagaagcctacccggaaaagttgtgatgttatagtggaagaattgaagtctctcatcgtatccaccatcaaaaaaacagaagaattcaagaaagcggtgacgcagttcaatggaaacttctcgtcaaaaaacacgtttcatttccgtacggaactggttggagaacaggattactatgatttcgcttccaatctgtgcgagtttgtggataatgataagatttccgattatcagaaacatatcagtgaacggtatacggatataatccgccggatttcgcaggaagtgggaggactgacccgtaatgaaagcgagatacacagaacaataaaggatatcaacgacgattttgtcaaacggaattttgccggagtaattaaggaaatagcacttcgtccgcttcagagcagcgataaactgatgcagttattgctggagattaagcggttctgtgatgagaaccaatataatatgggaaaggttgacttgttctcgcaggattcccgtgaagatgtcaatgcgacggctgtccggcatttgctgtcgtttatgaaattcctgcttgacgagccgggacgcagacggttggcgcttgccgatacattcaaactggagttccgtgtgaaagagaatgataacgatacgggatgggtggagaagatagccaatgtaggttccgacggtacggacattctggtaaaagcaatggtcaatatcatgctgattaatgtattcaaagaaaaggcttcacgtaagtttggtgactttaaaatccattgtatgatggatgaaataggcaagttacaccccaacaatgtgaaaggtattttggactttgccaattgccggaatatattgttggtaaacagttctcccactacttataatgtggaagattatcgttatacctatttattgagtaaagacgggcggtcaaatacacaggctgtcccattgttaacctataataagatagaaaaatgagtggcagtttatttacattggcgatggcgaggctggtcctgaaaatgctgggcggcgagctcataccttacacaaagtttgatggactgatagcaaatagattaatggatgagggaatcatcactattgttccccgagggagtatgcgtagttttcgtatgattgacccggaaggttgccgtatttatcttgctcagaattatacttccggcatggagttggaagattggattgagatgaagaactgtccggatgaagtgttacgttcggagcaagtggcgaaggcgggggactctaaactgagatatacccgtacgttcaaaggttttctcctcaattgttatgagcctatagaagctacttttcatggtgaactatgtgtgctttctcccttacaaggtacttccatcttcatgcaggattacgaatatttccgtattcctgaagatgttgtagtggtgggtatagagaatggagagaatttccagcatatccgtgcccaaaagtatttgtttaaaggaatgaaagttcttttcgtgtcccgttatccgcaatcgaaggatttgtgtaactggctaaagataatccccaatcgctatattcatttcggagacatagatttggctggcatttctatctttttaaatgaattctatgtaaaattgggcaatcgtgcggaatttttcattcctgcggatgtgaagaaacgcctcaaggacggaaaccggcagctttatgataatcagtatttgcgttatagggctatgttggtttctgacgaacgtttaaggccgttggtggcaatgattcataaatatgggaaagcgtatgaacaagaaggatatataaagtattaaattagttatatgattacactggataattttgagaactttgtcccctataagatattgatgcgcggggaagagtattatgatacagatgccgtttccgaactggaagaaacctcacccggtgaatggactgcaaccgtagagggaacggatgattataatgtagaaatatctatgaacggaaaggaagtagaatcctggtgctgtgattgtccgtatgatggagaaatctgcaagcatgtcgtggcagcacttctggcaattcgtgataataataaacgagtaagtcgtagtgcattttcaaaaatgagaatagttacaaaggaagaagaggttgtacagcccgatgtggacatcaaacaattgctgtcattcattagtccgcaagaaatttctacatttatcagtgaatatgcctcaacgaatccggaatttaaggcggcgcttttgaagcgttttatattcaaggaatcgtcttcgacatcaaagggaaaagattatagaacggaaatccaaaagatttttaatagtttcggtgacagtaaaaagtctcgttatcataatcgttataatgattacagtcgtgattgggaaactgttttcaatcgaatggatgtttttctgaagaaagcggacttctttttgagtctgggagatatggatagtactattgccatagctcttcaaacacttcgttctatcggtgagaattatgaggatgaattactatatattgacgatgatgatgactttggcacttccctttattgtgagcatgcaggaggtttactcatgaaagtggttggacatcctaaaacaactcagaaacaaaagacggatattctacaggaattacgtcagattgctgaaatatctacttatcgaaactacggaatctatgatatagatgaacttatgatgcaaatcaatctttcgattcagccgacagaaaaagccttggaattgattgatggacttcttgaaacaagaaaggacactcatgatttatatcagttagttcttcgcaaagtcaacttgttattggagcagaatgaagagcaaaaagcgaatgaaacgatccgccaatatctttatctgactgaaatacgggagatggaggttgaaaaattgattgtccgttgccaatacgatgaagccatccgtttgctggatgaaggaatagagattgcgaaagaagagatatatcccggtaccgatagtaaatggttggaaataaaactgaagatttacgagacgaccaaccggacttccgaagtagttgatacatgtcgtctattgtttgtgacaggcagggataaactgacatattacaataaactcaaaactctgattccgaaagaacaatggaagaattttctggatgcgatgatgaaggaaacagaatttagtaactatttttctttcggtggaagtgctgaagctgatatctatgtgaaagaacaggataatgagcgtctgttcaccttgttgtcatcaactagatatgatcaactggaagcattgatgcggtatgctcattatttgaaggatactcattcggaacagctgattgctatgtatacttcttcgttgaatgactatgccgaacggaaaatgggacggaggaattatgaatttatcgcacaagtgttaccgtgcatacataaactaaagggaggacagactgcggtgaaaaacatagtagcggaatttcggataaaatataaacgtcgtccggcaatgatggaagtgttgaaggatttttgaaaagattttattataagttttttccatctctgtagtttagggatgataaagttcgtacctttgtaaagttacaaataagaatgataatgaagaagtctataaaacgtttacccaaacgtacacaggaagaattgacagtcttgctggatttagtgtgtaaaaacatcgagaattgtcagatggttatcctgttcgggagttatgcaaggggaaactatgttttatgggacactaatatagaatttggtgttcatacttcctatcaaagcgattatgatattcttcttgttgtgaccgggcagactaaatatgtggaaagaaaattgaaccgtattacgaataaatatcatgacttgtttgcagaccgtcgtcatgcttttccacaatttgttgtagaacatattaatacagtaaaccgtaatttggaaatcagccaatatttctttacagatatagtaaaggaaggaattatgctttacaatagtggtaaatgtgaattggcaaaaccgcgaaagttgagttttagagagattcgggatattgcgcagagtgaatttgataggttgtatccttatgcgtgtgactttttgggtgttgtgaaggaatatttcatgcctaaagaacaatataacttatcagctttcatgcttcatcagacttgtgaaaaattatactatactatcctgatggtttttacgaattatcttccaaaaactcataaaattaaagagcttagtgggatggtaaaacgtttctcacaggaattgaccacagtctttcctcaaaatacggatgaagagaaagaatgttttgatttattatgccgttcgtatatcgaggctcgttataacaaagatttcagtatctcacaagaacaactggaataccttattgcccgcatagatattctgaaagatattactgaacgcttatgtaaagagaaaattgcggaatatgatacaatgacggaatctgtgatactatagtttaaaggtaggttatatgtagatacaaaataccaatcatcatcacgatagatgaaggcaaaattctttatatgattatctttttttatctccattatgctggcttaagggcatcgaagggacttgaaagagtaatctatcatcgtttccgtttaaacataggacaagatattgcataatcaggagtaggccgtttagggatattgggacgttgtaggccgcaattagctaatccatttttattagcccaactaagattatactcgcaattaaaacaagtttttttcagggtattatcttcaatctcaatttgttctgtttgaatagattgacgatgctctttttgctcacgaagttccgttttacaaagtctatacttttgcccattattttcaatgagtatgggagttgatgaggtaggggtttcctttactgcacaacacgaatatctcaaattacattgttggcaatctgtttcagatgctaccttgacagattttcctctactccgataaatcgattctatttcgttaaaatagacttcattgttaatccatcttctatctgcatttgatgatagaagaaattgctctaatgtttctaaagtctgattggaaagatcaacttcaagacaagtcagattatgatagtctatatcttgcttatgttgcactttataattaaatacgaactctatcaggtattgtttattatcatgggttgtggcaatcacatcgggttgtttgtcttcgcgctcaaaacgactatcgatttttacatcaacaaattcaatatcctcctccttatatataccataataagacggcgcatgaatccgcttcttcgtttgtataatttgctctgccaatttatacaatataaccatgtaacatatttcaagacgggctcctcgggtatcactatgatgggcaaatccatgttctctttcatcaccatgtctggcaagtaatttttcatggcaattcgggcaagtacattcacaacgtaaacctcttgatacactatcaacatgtaccattttcccctcggtattttcagcccaagaaaagacatactcttttttcatatttgctacttactataattttttattattatacaacaactctaacatttcctccgcaatcacactctctgaaatccttatcgcattatcctcttccgtattataaccgaggtaattcacacttccataccatattaatgatttatcaataactgtaatatgtaaggacaaattctctttggcaattactttaaccccaatccttttcaataattcatccttttctgaatggcattttacgaatactataatttgaacgcctcgcaaggtaagttcttgtagcataacaagcgtgggagtccgtatgctaaaccacaatttggaagaggatattactaccgatttacgagtacatgataggtcggaaagaaatggctttaagaaattcattccattaaatatgatatctggagaatcgtggaaaagatttgtcggattaattgtactcaatttatagccaaccgctgcatatcctttcaatctccgtttatacatggtgtcacataaggacagatgaatgtcaatgtaatcataaataataacatctttcttgcctggatactcacggtgcaaacgacctgcatattgtgctacgatgcctttccacgaaacgggcaaggtgagaaatagcgtatcaagacgaggatagtcgaagccttctcctacatacttgcctgtagcaacgattgcaagaagttctgttcttggaatattttgtaaacgttccattttcaagcgtttttcttttactgattctgagccgacaagcgttattacattcttgcattttgaagtaagcatggttgccaatatttccacatgagaggtcagatttgtcaaaataataggagaacgtccatcttgtaatgctttacatacatcatctatgatgcgtgtgttccgacagatgtcattactcattccttgtatggtttgagtatatgttttcttatcatccgtcaattcccgataatttgtaaaacgaggtataagcaaccgttcgaatgtttgcgaagccatctgtgtttttgcatcagcagaataacggataggaccacattgcataaagataataggttgatgtccgtctttgcgaatgggcgttgccgtcagtccatatacataacgggcgtttgagtacttcaatatccgttcgaaatttaccgctgaaacatggtgacactcgtccactatcaccatgccgtaatttcggataaagggttttatatcattttcttcaaaacaggattgcatcagggcaatatctaccatactatgtaaattgtttcctttggaatccaaggtcccaaaaggagaaaatacttttttgcgtccacgtttgtgtggtgtatcttcttgtttgtaatctatcatcaagtattcttccaatcgggttctccattggtcgagcagggctttggtatgtacaagaataagtgtgtttactttgcgctccactatcaatccgatagccgctacggtttttccaaatgctgtagttccatataatacgccattgttgtgtggtatcaagttttttatagctgcaacctgttcttcacgtaactctcctttgaattgaacagagattggggtgccaagttccgtttgatcgttcatgcgataagaaacatggttttcatccaacaaattagtaatagcatcctcacatccacgaggtaaggcgatgtatttatccgatggctctgcacatgagataatgcgaggtacattatatgtagataacctcattcccaattttgcatagaattctggatttttgaaagaggcaatgcgttttaagtgattaatcgcctttgcagaaagatcttccaggggaatataaagcatattggattttatgagaagcagttccttggggaaatcttcttttgcaatcttttgtgttgatggtgtttcccaaggtttggcttcgcttgtagttgacaaatctccaagttctgatgttattccatgcttcaataaaatcctatcaaccaatatttctggaactttttgcacacccaccaaatacgtccattggtcttcatatggcataaagttttcgtcgacgaatacactgttcccttcctttcgagctttgccttgtaggggcaatgcgaccaaatttccgaaaccaccttctggtaatctgtcttgatttgggaagaaccggtcgtatgacttgaaggtcatccgtccatttctttccatagcttctgttaatatggtattgcctaatttcctcgccttacttgcttccaaagatgtttcaaagaatatccagacatgtgcaccgtttcccgagcgtgaacgttcaatggcatgtggaatcttccattccttacaaacatttatataggataatacatcattttgatagccatgctcgcatgatttatcatcaaagtcggcacaaaggaagttacatttgttgtccgggaggatagcatatactccgattatatcgcaaccatcaatatccttaccctcaagatgtctataaacatcttcataactcaactccttaaaatggcgattaggacattcggtacatttatatttccttttatcacataattgtctgtcccattcattcaaacatacaggttggtaaccagattttccactattcttgctataccatcttcttgcaaaaatatctttccgaccatggaacaactctctaaacaatgcgacctttttttccaaagataaacgagtgactgcaatacttttttgtggcttatcatctatatgtagttgcatctttagatgtttgatttcatctttcaaaacattgttttcttcttgtagccgtacattggcttcaaaaagttcttcatatgtcaggttcttcttcatggtagataaaatctcgtaatcacattttctgctaaacttagaaataagtcgatatagcataaagcggaatattcgtcatccaatcctgttctcgataatccgacgtggagaaacgcaatccgtgcatacccggacgagaaaccacaaaggtaaaaagcgacttggcacgaagattctcctttgcttttgtctctatcggaacgatttcaccaccatgctgaatcaaaaaatcaatctctaacttcgcatcattgctatggtagtttattgctaaatttgatatctagtacaaaaatacatttttcctaccaaatattaaaattactgccatgtttcgtgcctaagggatatactcctatgaaatattttgtgtaaatgagaaaacaggattcagatgtttcttttatgtttggattctgttttcaaatataagaatcaaattaaaaaatactttattataagttttttgtatctttgttgctagggtatggcaaagttcgtacctttgtaaagttacaaataaaaatgataatgaaaaagtctataaaacgtttacctaaacgtacacaggaagaattgactgtcttgctggatttagtgcgtaaaagcatcgaaaattgtcagatggttatcctgttcggaagttatgcaaggggaaactatgttttatgggacagtaatatagaatttggtgttcatacttcctatcagagtgattacgatattcttgtcgtcgtgaccggacagattaaatatgtggaaagaaaattgcaccgtattacgaatcaatatcatgatttgtttgctggtcgtcgtcatgcttttccacaatttgttgtagaacatattaataccgtaaaccgtaatctggaagtcagccagtatttctttacagatatagtaaaggagggtgttatgctttataatagtggcaaacacgaattggctaaaccacggaagttgagttttaaagagattcgggatattgcacaaaaagaatttgatgaattatatccatacgcttgtgggcttttggaaggagtgaataaattttatttgcctgaaaaacaaaataaaatttctgcgtttttgcttcatcagacatgtgagaaactttataattgtattctgatggtctttacgaactatcgtccgaagagtcataaaatcaaagaatttggtgggatggtaaagcgtttttctatggaattaactactgtctttcctcaaaatacggatacagagaaagaatgttttgatttattatgtcgttcttacattgaagctcgttataacaaagatttcagtatctcacaagaacaactggaatatcttatttcccgtgtagatattctgcgagatgttactgaacgcttgtgtaaggagaaaattgcggaatatgatatgatgatgcaataattggtatattttatggggatgttcctaaaatattaaggtaactcggccgatgcgcgctgtgatgcaagctgtgaactttgtgccatttgtcgtattatttaattggtagtccaataaagactacactttttctaccgaacttttagtataaaatcacatttttcctaccgaatatttaatattatgatataatggcggaataattgttcctagtgaaataaggaggtgtcgcatttataacttgaactcaggattcgctctctatgaaatgaaaaacaaaatatatctgtcatctgtcacaggttgtaatctaacttacagattataagtacttaatgatgtgacagcacaaggtgacagcagtgtgatagcaataatgctgtcacctaaaaaacaaagacaaaataaagctttgtttaaaaatgaatagtatcagccataaatgaataagtcgttcaatttgttatctccgcacttatgaattgtgtcctgcctttaaactaacggtttcaaggcgtgaaactgttggttatgcggttggaaactttagtttcatacgcttgaaactctagttccaattacttgaaaccattggtttcttaccgatgaaactagagtttctcctagctgaaactttagttcaaagcagagaaaactaacttgaaccgtaattgagtgataacaatcccgtatctctcggctaaataggcacttgatatatcaataattttctatattaaaatcttgtttttcttgtcagtcccgaataatatgagtaatttagcagtctcaacgatcacaaagacgctgacaaaacaaattattatcaaattaatgaaaattactcaatttcgtaagaacgaagatacgatagcgcttagcgtaatggatcttgatatactggtaaataagataaagacagaaataaaatcccgtcctgtttctacattcagagaacatctgcgatataccctttccgatgaacggtgtatgtttgctgataaactgcccaagataattcctgccgctgaattccgtaaagtaaacggccagaaacagatgaaaaactacaacggtattgtagaactgaccattggccctttatccaataagtcggaaatcgctttagtgaaacaaaaagcctgtgagcaaccacaaacccgttgtgtttttatgggttcaagtggcaaaacggtgaaaatatggactaccttcacccgtccggacaactcccttccaaaaacacgggaagaagcggaactattccacgcccacgcctaccgactggctgtaaagtgttatcagccccaaatcccgttcgatatacttcccaaagaaccgaccctggaacaatattcgcgattatcccacgacccggacatcatatatcgtccggattctgttcaattttatctctctcaaccgtcatccatgcccgaagaaaccactttccgtgaagcggttcaggcggagaaatctccattgacccgtgccgtgccgggatatgatgcggaaaatgccttcctgatgcttttcgaagccgcttttcggaaagcgtatgcggatctccgggaagcgggactcgaattgcgcgaagacacatggcatcctttagtcgtccaactggctaaaaactgttttgcttcgggacttccacaagaagaagtcgtgaaacgtactgttttccacttctatatgtataaacaggaagagcttatccggcaaatgattggcaatatatataccgagtgcaaaggcttcggcaagaatatcagcctaagcaaagagcagcaactcgccttgcagactgaagaattcatgaaacgccgctatgaattccgccataatacccaaattggtgaggtagaatatcgtgaaaggctttctttccgtttccgcttcaatcctctcgacaaacgtgcgctgaacagcattgctttggatgcacaaatggaaggtatcccgttgtgggatagggatattagtcgttatatttactccaatcgcgtgcctgtattcaacccgttggaagattttctctaccggcttcccgcatgggacggtaaagaccgtattcgtgcattggcagccaccgtcccttgtaagaatccgtattggatggatttgttccaccgttggttcctcaatatggtttctcattggaaaggaagcaataaaaagtatgcaaacagtgtttcgcccttacttgtcggaccacaaggaacacgtaaatccaccttttgccggagcataatgcctccttccgagcgttcctactatactgacagcattgatttctcccgaaagaaagatgccgaactttacctcaatcgttttgcgcttatcaatatcgatgaatttgaccaagtgagttcgacacaacaaggcttcctgaaacatattctgcaaaagcctgtactgaatgtgaagaaacctcatggcagtgccgtgcttgaaatgcgtcgttacgcctcattcatagctacaagtaaccaaaaagacttgttgaccgacccttccggcagtcgtcgttttatttgtatcgaagtgaccggagtgattgataccaatcgtccgatagactatgagcagctttacgcacaagctatgtacgaattggaacatggcgaacgttactggttcgaccaggaggaagaaaagatcatggtggaaaacaaccgtgaatttgaacaagtcccgccggaagagcaacttttcttccgttatttccgtgccgcacagcctgaagaaggggagtggctgtctccagcggagattatggaagatattcaaaaaggcagttcaatcccgatgtctgtcaagagggttaattctttcggaagaatactgaaaaagcaagaaataccttccaaacatacgcgtagcggtacactctatcatgttgtaagactaataaccaggtgacggcaaaaatgccgtcaccctgccgtcacctcttgctgtcacagtcttatcggttcattactaaactattaactcctaatctgtgacagatgacagcaacttaccaaatatattcttctgtgtaacgttggtaagttggttcttcttttatccctttattacggaatagttgtctgatgtaggcttggtctttaggcataagtcctcgttctccgcgatagaaccgataatatcctgtttttccatagtgtccgaccaattgtattctgatactgactgcatcctcataggggattctgttaagcaactgtttaagtccccatgccacatggacttttactgtagttttgaaacattcgcattggtttccatccgcaggataacgtgccggattaacgatggagatataaaggtaatctgttgtatcaagttgtgtagctatgtggcgcaggcatttggaggcttgtggacattgagcgttgaaacaacgggcaaaattgtaagggacagacagactgtcgggttcttctttcattttgtagggtttattttatttgtgaaatactgttgtaaatattgcaaacagaattcttcacaaaagtaggactttattttgggaatgggaagcgttgggattgttttatttgtatgtaatggggatttcttatcaacatttggtaattagggatactcaatacatatccctaattatttgcagcaaggtttctctttcttgtttaaggttctttatctctatttttagccaatcaatttctttgttctttgaggaaatcaattcatctacaactcccttagggaaataattgttataaacgaagttgagtattttataaaggtcatctatttctctttttttaagctctcaaattgttctttctgtttctctaacagtttctcaaagagttcaatcgtttgttctatgggaaaattattgaatgtttggttattaccaattgcattttttacaccgcaattctcgtaaaaattatttgtgttatataaaaccgtttcttcgttatactctttcaatccgtcggtagtaactcctaatgcagaggctattttttctaatcgttcatcatcaattttctcggtttgttccatttttgaaacagcttgcttggttattcctaataattggcctagctccgtttgagtcataccgcgaagtctgcgtacacgttctatctttttcccaaggtgaaggtgatttgattttatattttctattgtttccattcttctatatattagattgctgaatctagcagtgattatttcatatgttttttcaggatctcaattttatcttgctcacttttcaacaaacgctcatataactcaactattttttcaagtggatttatttgttgaacgatggcgtatgtagtagcaccttcagagatatttgcatccttataattatgatgattaatattgaaaatcgtcttttcaacatcaaagtctttaatgacttcttcggatattcccaacacttcagcaattctttttagaaagccttcttctatttcctcttgtttctcaatctttgaaatgacctgctgatttacaccaagatcggcggccagtgcttcctgtttcatgcctaaatatacacgaatcctttgtaaattgcgtccgacatgtctccggttttccttctcttttatttcaacatccatattattgttctttaaatgaatacgtctaggcaaagataacaagaaacagtttaattcaaatgaaagtgtgctttattttttagtgtatgtttttgtttctgtagttttggttatttacttaatggaatttgttgctgatttctattagtagtatgtttaaggttatgtaatttggggaggaacgaaataaatatttgtttataatcttataaatatgggattcatcggatgatgcttaaaatacacaatgagtctatatgtgtttaatgtatctttatatagcttattatttcatctaattgggaagcaatatttttgaaatctgtatataagtcgagagttttgacatagattctatttccacatatactggtttctaaatcaggagtaatttcttcattagtttttgcatataaaagcatacctgcaacattgcttgaattttgtatatcatagtttttcacataggtgaaaatttggtataagttgttagaatgaagggtttgtttgttatattgtttttgcattgtttgcgaataatatttggtgtcaataataagcgttcttccattgtattctaacatgatatctgattgcatacatggaagtaattctagtgctttgttatcggattgatagtcaatattccattttattcgggaagtactggtctttaattcaggatgttctgttttgtaatattctaatacaaatttctcataaagccgatgcatatattcatcagagaaagttgccatgtggtatttaccatcttcagttgtctgtagtaaaccttccaaaataaaataacaaatattcatcagcattttataggtctgattattacgttgaaaatagagtgtattccactttacgatggatggttcaatggtattaatgttgacgaagaatggtaggactttctttaatttgttttttcgttctttggctactatctttccttggagaagaatactgattgtagtttttaatatttgattaaatatattattttctgatagttcatcaaattcgcatgataggatctgctgacattgtattctatgtttaatagtttttgttatgtcaattttccctctcattgtaggtagtgattctgttcttggtacatattcacgatataatccttgttttaattgatacgaaatacctcgcgatagaatttctgcaaacaagtcttctatatgctcgaatttttcagaagctatacttgcatagttgttacgcttaagtacctgaaaggcataagctagcatgtaataaatatttttgattaatatatttttgtcatttgtcattagaataagctctttagttcattttcccaaaaatcaactttttgtttatcatcaaaccaatattcatgtaacataggaataatgtcatagaatataatttcttttactttatcacaagattttaatccacataaataactgtgtcctatttggaatccgtcaccgagtgattcatctctagatatttcatcatttaatctcttgatcgtttcaattaatttgtcgaaagtggtattatgtaattcattttggtacttttggaagccgattgaatcaaatcctggtttcatgttgtagaaacaaaatcttcttctcaatgcataatcaatcatagccaagctgcgatctgcggtgttcatcatacctatgatgtggagattgtttggcacagagaaaagttctccattgtgtgctaatgctattttaacattacggtaatctttttcaattagcattaataattctccgaatattttactcatattaccacgattgatttcatcaattatgaaaaaataatcgtgttctggatcatttccggcagtaatacaagatttgtaaaatattcccttttttagttcgaatttttcttcttgaggtttataacccataacaaaatcttcgtatgaataattttgatggaattggactattgagattcttgaatcatctttttctcccattattgtataagccagtcgtttggcagagtatgttttacctactcccggggctccctgcaatatgatattttttttgtatttgagtatactttttagagttttgagttcttgttcatcaagaaatacgtcatttagaaaatcttcatctgtgtatcggccgatattttcatttgttcgtttaataggatttgtgtctcgaattatatccataatgaaatcatattcattttgggtaagtttgaataaactgccattaggattagcaaagaactccatattattgagttcctcgcagttttttaaaatcgaataatcaataggataagtaagcgattctgttttttggaaatagatatgttttccatcattctttttgtaaatcttagcaagtgcaactacttgtttggtaggagttgcttcataacagattgctatgtcaccagcttctgcatctaagaaattctggaatacacgacgtttatttccattgtcattatataaagtgtaagactgaatttctcctatgctccaattggacaaactccacatttgaggattagcatttagccaccagtagtgaagtttggaagtagggggagttaaaggagggatgtctttttcttgcttttttcctgctatctgaaatgttttttgacttttttgattattcttatctaagaagtatagaaaatctacagtagtagttgtcaattcgagatctggatcacaattcggagtgcgagtgaggacatcagaaagcattgctttcagttctgtatcttgttgcaaaatccatttgatttcattatataattcgtatgcttgcaatacagtattgggagtagcaccttttttgaaggtgtaactagtatttaaaatttgagatactcgcgagaattcccttggtttaaatatgtaatatcgttctggatatctaagccataaataggtgcttattgttctataatcttgaaagtgatttctccaagtgcttttgtatttctcaagtataaagtctgattctttaataaatttataaattcgatcggaaaggggaatatgttcattatataaatcaataaacatctttcttacatcttcaggggcaaccattgcgaaattctttatcatgcgtctaggaaaataatgttgtgctcctagaagattttgagttttcgaaagagaagttttaagcatttgtgtgaaatctggggacttgatatcccaatgggattgaaaccagcttactgcttcccatttatacttttcatcattccaagaggagaagaaatttgtcttataatcttttatttccttctctaacttatttatgtctatattcataatagggtatttttattgttgttctttggggtataatattcaactctttcatctgccgccattggaggatatgtttcgttatgaaaatcatattttctagtttcgttgagtaatgagttgtaattatcagaatcattatcagtccattgttcacattgatgaataactgtttccagtgcattttcagcttcttctggtggatatttgtattttttcagaagtctttttatcatacgacgcatccctgctctggcggattctttcttctgccagtcgattgagaatttagcagtttaaatcgttggtttcattgttagttatctcttaatttagcttctatctcttcaatggtaggcatggtaccttccactttttcgggatagaacttctccagatcatattcggaaatacccaaaggttggctgctcgactccaaagcatactgggcttgtatgcggtctttctctttgcaaatcagtaagccgatggttgggttatcccgtccttccttacgcagcaaatgattgcaagccaccacatatccacctaattgaccgatgtcggcaaaagcaaatttaccgatctttacctctaccactacatagcaggaaagcgaaagattataaaagagtaagtcgataaagttttccgtttcgcctatttctaaacgatattctttgcccacataagcgaaacccgtatccagttcaatcaggaatcgggtaatgttattcagtagagcatctttgagcaatcgttcattgtaacgcccagttatacccgtgaaagcaaaattgtaggggtctttggtcaactcctgtgcaaggtcgctcatcgcatcaggcaatgtttttgtaaagttagtcagtgccttgccctgccgctcataaaggtcggtgctaatgaaattgagcagcatactacgactccagccgttctccaccgtctggtgaacatagaacagagctttgtctatatcgtcttttactttatccattatcaagcaatggtgtctccatgggacttcaaatattccaccaacttggtggaataattccgtttcattttttccaccaagttggtggaaagttttcagagcatccttatataacaaataaaacttcctacaatagtaaatattgctctttgacagacctgccgcattgggtatagcttcacgtaaatctttgctcaattgagtgataacactttcgccccagcgttcttctacgtgtaattcaacaatgtcacgacctaaaagccagttgaatttcaactgttccacatttattttcaccgctgcctttatttggctttggcgatagcgaccgcaaaggtctttcacccattgcagatattctttatcaagtatgtttattgacttgttcatcgtaatctataatacttcagttgcgttaatttttagttctcctgacatcagcttcgggagaagtgtgtcgcgtagaattgttaacctaatactttcctgttcatttcttagtatttggtcgaaatacggtttatttatctgcctatttttgtaaaacagatgattcttattgttatatgtattgtatcttatccgcattttaattaatgtattaaaagtagaaattaatttccattgtgctgtcgtactttaaatgagaagtaaatgtaggtattattattgatgtaattgttatagttggagtaaaatttattcttttggttgttagaatatgcagaaacttctattctaacaaaaaaatgatttgcaatgaacattctaatgcaagtttaatacttcgcttaacttatcctcaataattttcttctcattactaccaatagtagacaatctcaccaatggaattccgtacaactctaagatacgatcctttttaatatcacgttctgactgactcgtccccgatttgtggaatgcataaccatccgtctcaatagccaataccggttgtttgcttacacgattataaattagaaaatcaatatgagtatttatatttgcagcatatttgctttcctcttcattcaatagagaataatcctgaatcaacatatagagtggtaaatggcaaatgatattcaaatgacgcatattgatattctctttcagaatatctttaagtaaggcaaatgtaagattctcggaatcatattcggatatttttttgtgcttcttcaaataggctattcgggcatctgtatattgctcatatagataatcgaatatagaatgaatcttactggtggaaacagtgccattgttatattcgatataagcgatcaaatcgctgatattgcagtctttgggttgttcgtttcccgatacgactaaatagaattgtgacttagcccgcgaaacagcaacattgagcaggttgggatcgtcggaaaaggaagtgatgacatcgtcgacagtggtcataatgatagcatccttttctcttccctgaaatttgtggactgttgcaacatcaatatcctcttcaagtgcggattttactgcatctacttgtttgttatatggagctatgacgccaatttcatctgtttcataagatagattcggtagtacttcttctttgataacatctatttcccgttgattcatgtggctgcgggagtggttacctttggctgtccgtatggcacaaatgacatcctcttctcctttatcacgtgtcatgatgacaagatctccaccataaaatttctgattacagaagttgatgattcgaggatggcatcgataatgttcccgtaacaaggtctgcggtacatttggaataactttgcagacggattgcaaaaaactcatattggcacaatcatattccggtttaatcaggcacgcattggcgataaagtttagcgtttccttattttcttccgtgaccacattgggaagttgcatggtgtcaccgacaatgattgcatttttagcacatgacaaggctaaagctccggtttcaacggaaacctgtgacgcttcatccataatgatataatcatatacggcatctcgttgcagactgcttaatgatgaaaaggtagtacttaatataatagggtattctttttgtacctctcgccaattattttttagatcagggagcgtaaagatgggcttgtcatgattattgccataggtatgaaataactgattctttagaaatttcattgatgtatcggccatttgtctagccatttctgctgcatctttgttggcaagctccttttctaatgtgtctatttcgacttccagctctgcatactttgtttggtagaataagatttggaagtcggcgataatcaaactcatctcccgtttatagaaacctttatcggggattttacaaatcgttttgctcctgaatttaaagaagaaccatttcaaccgttgaataaaagctgctattccccgaagacttgatgattgctctttttctgcaaattgttgacattcattccataaattcagaaggtctgccgagctggaatttttccgttgttggagagtaaattcttttgttccgaactcttgcagataatgttgccactctatttttaaagcttgtatttcctgtcttgccatggcaaggcattcctgtttggaaaatatgctttttagttcttctgtctgatgatgtatctgattgagaaattgaggttggtcggcatccgtatcatgccatgactcaaagtgctccggatattgtttttcctcttcttgagtttcgatgaatttctctttgttagctgtgctgccaagcaatgcaacaatgaatcccatatcgtatttggataacttctcaagtacattgacaatggcggagttattattagatactacctgaacagtcttaccacgcacaaggatattggcaatgatgttcagaatcgtttgtgtctttccggttcccggaggtccttgcacaacgctgatttgattctcaaaagctgcctggactgctttttgctggcttgcattacaaccaaaaggaaaaatcaaggttgaggcagtctggggctgcattttatatttttgaggattcaggtatacagcaatagctctgttgtttgcgataaaatgaatcttttcatattgttttgccaatagcttcgttccgtcatcagctttcaattcgttcgcatcggcaactttcttcaaatatttgaatatacttttcgaacgactctctcccaagcatgattcgataatttctaagtccttttctctgtaatcatactctttaccattcagaaaacgaatgtgccaatagttgtgtgatccggccttaaaaatagataaggctttgatatttgataaagttctccctttactgattatttgataattattggggtccggtttgtccggatcagtcagccaaaggacattttcttctttgtaagtatacgcactaggaacatttcggaatactaccttatagttgccattatgattttggcagctctctatttcgggagtcttgatttgtccttttataataatcagattttcggaagtatctatcataggcttgtgtgtaaatataataagtcgtgctggtgtttttatttattattttggatataaaagtaagaatattttccagaatatcaaaactgaagtagaaaaaacagtgaatgactttattcagctttgtattgttataaatatagagtgagattcggtttgggagtattgaacgtgataaaagagatttgttttgccaatgaaatcattatctttgcaaggtatacattaatgaacaaggaggatattatgcttgcatacacatatattgaacacggaaagtttgaattgcaggagaaagcgagaccggaaataaaggattcacgggatgcaatcgtgcgtgtaacacttggtagcatctgcaccagtgatcttcatattaaacatggcagtgtgccgcgtgctgtgcccggaataactgtcgggcatgagatggtaggtgtggtagaacaagtaggggctaatgtcacttcggtgaagcctggtgacagggtgactgtgaatgtcgaaactttctgcggtgagtgttttttctgtaagcatggatatgtgaataactgtactgatcctaatggcggttgggctttaggttgccgaattgatggcggtcaggcggaatatgtcagagttccttatgcggatcaaggtttgaatcgtattccggatacagtgagtgatgaacaagctttgtttgtcggtgatgtgcttgcaacaggcttttgggcaacacgcatctcggaaataaccgtggaagatactgttcttatcatcggtgccgggcctaccgggatttgtactttgttgtgtgtgatgctgaagaaaccaaaacgcattattgtctgtgaaaagtctcctgaaagaattcggtttgtccgcgagcattatcctgatgtgttggtgactgaaccggaaaactgcaaggattttgttctcaagaacagtgaccatggtggagcagatgttgttttggaagtggcagggggtgacgattccttccatttggcttgggattgtgcccgtcctaatgctattgtcacgattgtagccctctatgataaaccacaacttcttcctttacctgatatgtatggcaagaatttggtttttaaaacaggtggagtggatggctgcgattgtaacgagattctcatgctgattgaggaagggaaaattgatactactcctcttattacacatcgatttccgttgaatgagattgaggaggcctatcgtatctttgaaaacaaattagatggagttattaaagtagctatatcaggaaataaataaaaatagaatttgtgtatgaagcatatacttatagtaagtaataatgatatgtgccgcagtcgtatggcacaggaaattttgaactccttcggtagagggatgaagattagtactgccggtattttggctggaaattctgtccctgacgttgtttgccaagtgatggaacaaaatggatatgacttttcgcgtagaaagccctgtgacgttgcgacatatgcccaacagacgtgggattatgtcattaccctttgttcggaagcggaggaagtgcaaaaggaaatgcagggggtagtgagaaaatacgtttctttcaactttacagatccctttcagggaggaattcatgtagaagatgagcaggaagaacgggttagggcactatatgacatcatgcataaagaactgtatgagttctttcgaagtgaattgatggaaaagttgttacctcgctgttcctgtggcgcaaatacgtattgtaggtgtgagtaggaatataagtaaaatcatatatgtacatcatccggtgatggtggcagatctgtgtcattttgaacgcgaagttgccagaaagcaatagcggatgcggcggctacattgagagaatcgacaccgtttgccataggaatgcggactacatagtccgcctcattgattgtttcgttttgaagaccatccccctctgttcccattacgatggctaacttgggttcggttgctaagataggattatcgatagagattgatttctccgtgagtgccatagcgactgtacggaaaccctgtttacgcaactcattgggagaaccgtccaaccaagtccatggtatcaggaagacagaacccatcgaaaccctgactgcacgtcggtttaacggatcacaagaattgcgtgttaataatatagcatctattcccaaggcggctgcggaacggaagatggctccgatattagtagcgtctaccacgccctcaatgactacgatctgccgggctttccggcacacctcctctacacttggtagtgcccgacgacgcatggcacagaggacaccgcgcgtcagtgtatatccggtcaatgtggcaagtaactttctttcaccggtatagacaggtatatcaccacaacgttcaatgatgccagcggcatcaccagtgatatgcttctgttcacacaagagggctaaaggctcataaccagcattcagagctacatggataactttggggctttctgcaataagcaatcccttatcaggctcgatacgattccgtaattgagcttcggtgagggtactgaatatttctactccggagtctgttaaggatgatatttctataatgggcatagtgatttctttaaacgatctattttattgcagcaatgatagtatgcgcttcttacttaccgatgcagcatattatgctaattgattatcaataatttacggcttaaaagatagactgctcaaaaatttacttgttttttcgccgaaaatcgaagatttaacgtttttaaccttagtttgtcttcaaacgaaggggaaaagagaataatggctctcttttgctcttaaatctccgtttcgcaaagataaggcatatcggtgattatttcgccgattgtggctgtaaaatagagggtaattttacggattttcggatgggcttttggtggcttgacaagggctcgaatcatgtttgttttgtgagcaggatttctgtgtcttttgcagccaaaagagaaagtcagcagttatggttcggcttggttctggcgcagccatctctttttctccctctgttagctttactttaatgcacgtatatatgaatacagggataaagtaaagctatgttgtatttttacttgagtgataaactgtactcacatcgtattcgctctaactcattttttaaatcatttatatgtaaaattgttagataaacattttctagatctgttatttcatgtatttgcgatagtgaatataatggtcttaaaaactttttcactttcattcgttcttttcttgcagaattagtggattctttacacttggtttctctcagtagttgagacgttaaatctttgtcagacctattgccaaaattgacaatagcaattatcttaatataatcttttgtgtcttgaatacttttacttgcctttatatgtcgagatgattctaaccgtaattttctagcatcttcaagaattgcattgatttgtgcagcaccaaattttttgttgcggattagagaattgcatttgacttctactaatatttttacaggagagtcaattcttatgtcgaatccatttgtgtttggcttttgtttatcaatatcattaaatatccgttctctatcttcatttttaaatgataatatatctgataactttgttgcaatagaacgagtcgatattaatgtcattatgttattaatatcggacagtattgattttagttctattaatttatctagtgtaagattgttgccaatatcctcggtgtcaatagacttgataaactttgtgtacttatctaataaattaattgttctattgtatgtttttgatgtttccataattttgtttctttgggggacgaaaatatgtataaaagttcatatatgaaattttgtcaggcttgttagtcgggatttcgtattcttttgcagtcaaaagagaaagttttcagatatgattctttttcagagaacctccgttgccgtatttttccgtacttttgtaacaacctgtgcaaaatttgcacactttaaattattgaaaatatgaagattgaagaggctatactctactgtttggcaagccagaataggggaatgcgaactgaacagattgcagagatgataaaccgtcagcgattgctccatactacctttaggagtaggtaaaaattagaaggcgtgatgcatcagcacctctaaaagtctcatatatcaagtacgcttaaatctggttctttgcacgaatctagtaaattcacgccctttatctttaattcagggtaattcagaattgacattggtattttctctcttttgagataggatgttggtattactgtagctgtcagcatcattgactttactcggggtgtaactgctacaccaatgtgtttcgcaacttcattaatatgctccgttacccagcgatgacgacgcaaatgtttaagaacaagagctctcttcttgtctctctcgggattatcaccacgaccaagatattcatccatctcggttttcatttccttaatattcttggctggattggtattcttacattctatcaagtagagtatatcacgtgatgtatcataagccatcacatcaatatcgccataatctttatctgccgcaaaataacctccagatttgatagtgacatcatgttcccatactcgcattattggtatctttgccaaaaaagagcgtacctcgtcattgaacgcagccccttttatagcctcaaattttccaagcaaggtttctatcttccttcccacataacgtaagcgaccagaataaagcaagtcagatagctgaatgccggcttgaatacaggagcggaacccaaacatgcacataactgtgccatcatcatattgataacgaatcactgggcgacgcagataacttaattccctattgtatgaccaagggaagatatccttgcccgctaatcctactggcggagtgaggtagttttcccgtttatccaaagaaaggcgaatgatacatttctttgctaaatcttcagttagttctgtacaatgctcctgcatagctttgatgagttgagactcttccatctcaataacagacttctgctgcttcatagctatgatgtaacaaacataaaggaactgcaagatgttagaatatgatactccccaatcctctaagaatgccacatctatctcctcgagttctgcatccttgtttttttcttttgtatctggacgtactgccatcctggccatcttactctcgaaatcttcgatttgcccatttacactctcaatagtgcgcgttgctgcaaactctcctacattgtcggaaaaaacatcatcgtagataccataacgtccagagcctaatttctcaatggtatgattagctacatctaaatgtatggcgtcacatataccaccaatggatatcacttcgttcatgatagctaacaggctttctacatcatcattgcctggtttaacaccaccgccacgatactgtgtcgcagctatatattctatcatagcacgggtagatattccagcatcagcaagtcgtctttctgtatcgaagaattctttacgttttgactcattttctccaaaacaaagaatctgtgcgggttgtaagactctgttatgctctcgctgataaaccaatgtctcgtgattctgcatgagcatacgcagcaaccacaatgtatcaaatgatgataggcgtttatcaagttcattaaggagcacatctactcctttgtggaggaagtcttctttctcagtttttgtattgagtttacctgctatatcatgacctttctccttcatccactgtgggaatttgtcttgtagtagttggctggtggcggcatgaatatagataggagtataaagccacaagggtattgacagggggttgagtgactgctccatcatcagaatcatctttgcttgaccaaaggggatgcgagtatcaataatttggcatgcagtctcttcgtctatttccaggagtttttttatgatacaacgcatcatgttgcgctcactctcattgccagctcccataaaagaatggatataatcatcatcaaatgtaacggaaactccgccttctgtcttggatacgttaagatttcctccttgcgtaggctttatgtcgtcatcatagtgtatccctttatcggccaagaccttttcactgaagacaagttctatttctacggagtgctcatagcgttggctgatcatatcggctatggctggttgtaaagtatccatccagtatgcaacagctgttattacagtatcggaaatagaggatggatttattccctgtttttcttcttgataacaacttacccacacaggaatactataagattcacaactcttggcattgaaacctgaatggacaggcttaaaaattgccgcatagtcgagatcacgtatcactggtatataagcatactgtccatttaatctcttcagcgttccgtggaaatacagttgatctttacttttgaatatgagatcacatccatcatttggctcaatataaagcatgtctgatggtgtgttgtctgtcatatagaaactttcaccataatgcttatatatagcatatacatcgagagattgattcagaggagtctcgagagatgatacgttctctttggaccgagcataacgaacaagactcaagctgtcccatttctcagtctgtatcagttgtaagaaatcataagcagagaattgaagaaaatagtcagttccattttgctttttcatggcaaatctgtatgtctcccccattgtagaatacagaacaagcgtcaggatatggtcatctttcgaccttttatcatttctgatggtatcaatacgtttttgtaaatgttggctgagatctcgattgttgaaactctcattgccatctatggctacattacgggctaaatcatgagcatagcacacgtatgcaagccagttgacatcaatgcggaatacatcttcgtaatagccttcaacaggagcaagtatttcatccattgaattttgtacccagcgcagctgttctatacaggaacgcccgatgcgcatccagacaccataatgggtctgttttactagttcttcaagacaacgatgttttagagctgtttttaagataaagttgttaatggcacagccttgactggaaattccggcaaagtagaagttattgtcaaactcaacgattggtctgtataacaacggattcttttctgcatcttgggttagtatatcagtagcattaacttctaacaaaaatgatttcaaaacatttggattcagcctattccgatgaatgagttctgtcattgtcggcaaattaataacaaaagattggctagtttttggttcgttaagcgtctcgcgaggggtctcatttccgcgtactaagccacttatccctgcttgggttgacaaaagcttgctcagttcaagcatgaagagtactccatcataaatttcattacggaaagcttccgtaaatatatttcttttattgaatatggcttctgtcattgaacggaaaatttctgtcgcatgtgtcgagatgccaggaaagaatgtgtaattgcctccataaaacactacaggttcggcaaacatgttaatcggcatgtcttccataagatcaaatgagaactcttggtcaattatactcttgaactcactgatgtcaggaatctggctactctttccgagattcgcaactgctatttgcaaaaggtgctcaattcggatattcttccctcgattttgtggattaagttgcattgctatcaaatagtccaatatgggagggactgcatgattacttaaatacgctatcgtttttggtacatcaagccaagaagatggccacaaagcatgatttgctactggcaatattcctattgcctgttccttttgcatacaacaatgcttatatttcttgccgctgccacaagggcaaggctcattacgacctatcttctttgacattatatttgaactactagtaacatctatctaaactttaatcacttagctcagccaagaactattaatcatttacagtgcgagacgaagaatgtattatgggttagagatgaaatgagtgataatcaaattcttaccacatttatactctaagtgatttcttatacaaaggtactgattttagtcgataacatttaatgataaacgatggaatttctaaaatgaactgttttcgactcaaaaatgagacataatggtcaaagggatttggcaaattatgtgattattttgcagtctccaaaaaagtcggcagatatagttcggttcggctttggcgaagtcatttctttttctccctctgttagctttactttaatgcacgtatatataaatacggggataaagtaaagttgtttttcatttgaatagccaactaatcttgaatatatgttgtgtggaggaatcgtatgtgtttacgcaacaaataacatattgtttgttgtgtggatatattggcgcttataaacaatataatagcgtttatatttctccaaagcaaaattatcttgttttacacactttccccaagatggttgtcggaagctgctgcaacttttataaacatagaattcgtttgaaaaagtataacgaatctgatttattcgcttgaaaaagtgtataaccgttatattgtacttggtcaagcgtttcttctaatcttgtgattttttacctgtaatacatcattaaatagatgaaaagttataaatttacatattatatgatgtgttgaatatggcaaagaatacaatggggactaagctgccccgaaaattggtgcagaagatgtcaattgtgggagagcagattaaactggctcgcttgcgcaggaatctgagtgtggctcaggtggcagaacgtgccacttgttctccgttgactgtgtcccgaatagaaaaaggcacaccgacagtagcaatcggaatctatttgcgagtgctgtatgctttacagcttgacgatgatattctatggctggccaaagaagacaagttgggaaaagctttgcaagatttgagtttgaaaacaaggaaaagagcttcaaaaaaggaatagagcacatgttctcctatacataagttgcaatttgctctttgggaataaaaaaatatggctcaaaaatttgtgttatgcaataaaagcattatgtttgcgctgcataataaataagatatatgaaattcgttgatagaatagatgaagctgcacgattaaaggatgctcttgcaagagagaagtcctcgttagtcgtgatgtacggtcgcagacggttgggtaagtcaacgcttatcaaaagggtgttgtcggatacggatgtttacttccttgctgaccgttctgaagggcaacatcagagagtattgcttgcaaaagtaatagcacaagtgttcccggatttcgacaaactgacatatccggattgggaatctatgtttcgtgcggtcaattatcgaacagacaagcgttttactttatgtttggatgagtttccgtatcttgtagagcaatcttctgaactgccgtctgtgctacaaaaactggttgatgaaaagctgttgaagtataatcttgtgctttgcggttcgtcacaaaatatgatgtatggattgtttcttgattctactgcacctctctatggtcgtgctgatgagatcatgaaacttgcaccgatacgtttgccatatattcaagaggctttgagccttgatgcgatgaatgccattgaagaatatgctgtttggggaggtgtaccgcgttattgggaactaagggaaaaccaaaattcacttaatgatgctttgtggcacaatatcctttctgtaaatggaactctttacgaagaaccgataaaattgtttcaggacgatgtaaaggatattgttaagacttcgacgataatgtcttatatcggtactggcgcaaatcggctttctgagattgccgcaagatgcaatgagcctgcaaccaacctgtcgcgtccattgaagaaacttattgatctcggatttttggagaaagatgttccgtttgggattgatgaaaagaatgcgaaaaagagtctttacaagatagccgatccgtttatggcattttattatcagtttgtcgtacctaatcgttcgttcatcgagcttggtcgtcgtttgccaatagaacaggctttgactgctcatttatcggagtatgtgagtatgcaatgggaaaaattatgtcgggatgccgtaacaggaaatcttgtcaatggagtggtttatggcaaggcaaaacgctggtggggttctgtgctcaatgaggataagaagccggaacaagtcgagtttgatgttatggccgaatcgcttgacaaaaagtatttgttggtcggagaatgcaaatggactactcaagagaatggcaaacaactgactgccgaacttctccgcaaagctaatctgctaccgtttgccaagtgctacaccgtcgttccaatgctgttccttaagaatgctccgaaagatggtataagaaacgccgtgttgccagaaaatattgtcgagttaatgaaataaagaaataacaaattcgtgatttgcagatgttggattttagaaaacaattccaagagattatagaacaatcttatatccctttcaatatagataaaactgcgacttctgacgtatggagtaatatttataagttagtacttcctaatataccggaaaaactttttaggtatcgtagaatagacgataagggctatacaattgaatcatttaaatctaaaactatttcattatgccatgcgggaatgtttccagataaatatgattcgtatttatatatagatcaagataagattcacaaagatctaaaaaatgcattgaaagatgcgttgcgcataacattgtcgcatataacacagaaatcccctgaaataagggcggaaaaagcaacgaaaatatgttattatagagagtgcggatatacggatgaacaaattatagataaaatattgacagatgattatgttgatttttgcaataatataggggctgcgataaaaaaacaagaatcgcgttttagaaatccaagaaatagtgcaaaaattgcctgttttacagaaagtgtgcagtctaagtatatgtgggatagatatgcagatggatataaggggtttgcattagaatatgatctcagacgatgcatttttaaatataattcattgggaatgagtgttaatctctttcctgtgatttatacagatttaagaccggatgttacattagatgagggaaatattcatacttacgaatatttcaagcagattggagataaaaattggttaagctttttgtcgtctataatatctgttaatcaattatattggtatcgagtttatctttataaagacagaaaagaatacgagcacgaacatgaatggagaatgatttactataatttagaagatgagaatgattatgttgcaataccggatgttggatgcttgaaagcaatatattatggtccagatatatcacaaaaggataagcaagaattacatcagattgcagttgaaaaaggactgaaagagtatgatgtcgatcttgacacgggtagccgtagatatgatttaagagtaacagcaattaaataagaatattcttagcgcaaaaaagaaccgattaacaacctgaaagttgtgtcatctcaattatttatagtacctttgcttaccaaataaggcaaaggtatttttgatgcatacaatggcagaagataagatagacaacgcactggaagtaaaagaggaaacagtggaatgcaaaagcgaagattgggtttgccattcgcaggctatagctgcaaccatgtcaaaccgaatggaggaacttggcatgacacaacgagcgttggctgagaaaatgaactgcacccagcaatatgtatccaaggtgttgaaaggtcgcgagaatctgtcattggaaactttgtgcaaaatagaaaatgcattaggtatcaaaatactacaagctggaataaataagtaataacaccatagtagggaaagaatatgtcaatacagagcgaagcggcattggaagccggacttatagccacacttcggcaaatggactacgagtatgtccagattaccgaagaagataatctttatgccaacttcaagcggcagttggaaattcacaacaagaaacagctggcggaagttggtcgtaactcatttacggatgaagagtttgagaagatattgatatatctggaaggtggtactcgctttgaaaaggctaagaaacttcgtgacctatatcctcttgacacgatgaacgggcagcgtatttgggtggaattccttaatcgtacacaatggtgtcagaacgagtttcaggtgtcgaatcagattacggtggagggacgaaagaagtgtcgctatgatgtgacgattcttatcaatggcctccctctggttcagattgaattgaagcgtcggggtgtagaactcaagcaggcatacaatcagatacaacgctatcataagacatcctttcatgggctgttcgactatattcagctatttgttatctccaatggcgtaaatactcgttatttcgccaataatcccaatggtggatataaattcacgttcaactggacggatgcggcaaatctgccattcaatgaactggataagtttgctgtatttttcttggaaaagtgtacgctcggtaagattatcggaaaatatatcgtattgcatgaaggggataaatgcttgatggtacttcgcccataccagttttatgctgtagaaaagatattggatcgggtacagaactccaacgataacggttatatctggcatactacaggcgcaggaaaaaccttgacttcattcaaaacagcacagcttgtttcggagttggatgatgtagataaggtaatgttcgttgttgaccgtcatgaccttgacacacaaacgcagtcggaatatgaagcctttgaaccgggagctgttgacggtacggacaatacggatgaactggtaaaacggctgcatagtaactccaagattatcattaccactattcagaaactcaatgctgccgtaagtaagatatggtacagcagcaagatagattcgatatgccactcccgtatcgtgatgatatttgatgagtgccaccgcagtcacttcggggagagtcataagaagattatgcaattcttcgataatgcccagatattcggttttaccggaactcctatttttacagaaaatgcagttgatgggcatacgaccaaagaggtattcggcaactgcctgcatcgctatctgattaaagatgccattgccgatgaaaatgttctcggtttccttgtagagtattatcatggcagtgaggaagtgcagaacggcagtactaatcgcatgacggaaatcgctaaattcatccttaataatttcaataagtcaacatttgacggagagttcgatgcattgtttgctgtacagtccgtaccgatgcttatccgttattacaagatattcaaggaactgaatcccaagattcgtataggtgcagtttttacttatgcagccaatggaagtcaagatgatgatctgacaggaatgggtacaggttcttatctgaatgacagtgccggtgaggttgatgaactgcaagccatcatggatgactacaatgaaatgttcgggacatcgtttacgacagagaacttccgtgcatattacgatgacatcaacctgcgtatgaaaaagaagcgagttgatatgaggccgcttgatctttgtctggtcgtcggaatgttccttaccggttttgacagcaagaaactcaatacgctttatgtagacaagaatatggaataccacggcttgttgcaggcattcagccggacaaaccgtgtgctgaatgaaaagaaacgcttcggaaagattgtgtgtttccgtgatttgaaaagcaatgttgataccgctatcaaattgttcagcaacagtaacaatccggaagaaatagtgcgacctccgtttgaagaagtcaaacaggaatacaaggagcttgctaccaattttttgaagaaatatccggacacaaattgtatagaccttttgcagagtgaaaaagctaagaaagagtttgttttggcgttccgtgatattatccgtaaacatgctgaaatacagatatacgaggattataatgaagagtctgatgatctcggcatgacggaacagcaatttatggatttcagaagtaagtatcttgatatccatgatacttttgcactcgttgttccagcaccgtcacccaaaccggatgatgatacagatgttccggatgacggagacctcggtgatgtggatttctgccttgaactcctacatagcgacattatcaatgtggcatatatccttgaactcattgcagaacttgacccatatagtgccgattacgcggaacgccgccagaatatcattgacacgatgattaaggatgctgaaatgcgcagcaaggcaaaacttattgatggcttcattcaaaagaatgtggatgacgataaggaaaatttcatgatgcagcgaggcaaggctgacggtacaagcgatttggaagaacggttgaaccgctatattgctgttgaacgagaaaatgccgtcaactcattggctgaggaagagaaaatatcgtcatcagtattgaatcatttccttaaagaatatgattatctgcaaaaagagcagccagaaatcatacaaaaggcattgaaagagaagcatctcggattgataaagacgagaaaggcgttgacgaggattttagacagattgcgtaatatcatacgcactttcagttgggattaaaagaaatactgatatggtaaagacaaatgaacccggatatgtgtatatcttgactaatccaagttttcgtgaggattgggtcaaaatcggtaaaagtgcgcggcctgtagatatacgttccaaggaacttgacaacacggctgttccgttgccttttgagatttatgcaaccattcagacggtcaaatataacgatgttgaaaagcatgtacacaagactattgatcggttgacggatttgcgtattcgtcagaatcgggagtttttcaatgtgccgccgcaaatagctttggatatattcaatgacatagccaagatgattgatgatgcggttgttacggtctatgtagataataaaccggtttgccataacgaaaaagattcattgcctgtcgtgcagaagcgaaccgtaaagcgagggcgtttcaaattcagcatggtcggtattaaaataggggaatgtgttaccttcatgcctacgaatacagaagtcaaggtggcaagcgatgattccgttgaatatcaaggtcgtatttataaattgtccccttttgtcggtacgtttatgccggaagagaaacggaatacatcgggtgcatatcaaggggcaaaatatttctcatataaagggaaagtgctggatgacctgagaagtataattgaaagcaatataccattgccggaaagtgatgtaatacagaataatatagagcaataaggatatgagtgaagaactgcaacagaaactccgtgaccagctttgggcggtcgcaaaccgtttgcgcggcaatatgtcggcaagcgattttatgtattttactttgggattcattttctataaatacctgtcggagaagatagaaacatacgccaacagtgcattggaggatgatgaagttacattcaaggaattatgggaaatgaccgattcggatgctgcggaattgcaggaagaggtcaagaaccaatgcttggaaaatataggctatttcattgaaccgaaattcttgttttcgtctgtaatcgaaactatcaagcggaaagaaaatatccttccgatgctggaacgctcattgaaacgcattgaggatagtacgctcggacgtgacagcgaagaggattttggtggtctgttttcggatattgaccttgcttcccctaagctcggaaagacaaccgatgacaagaatacgcttataagcaatgttctgcttgcacttgatgatataaaattcggagtggaggcctctcaggagattgatattttgggcgatgcttatgagtatatgatcagtcagtttgctgccggtgcaggcaagaaagccggtgagttctatactccgcaagaggtcagccgcatattggcggagattgttactcttgggcataaccgtttgcgtaatgtttacgaccctacttgcggtagtggttcactattgctccgtgcagcaagtatcggtaaggcggcatatatctatggacaggagaaaaatccgactacttacaaccttgcccgaatgaatatgttgctgcacggtatccgattcagcagcttcaaaatagagaatggcgatacgcttgaatgggacgcattcgatgatatgcagttcgatgcagtggttgcaaatcctccgttctctgccgaatggagtgctgccgacaaattcaacaacgacgaccgtttcagtaaagcaggacgacttgcacctaagaaaacagccgactatgcttttattctgcatatggttcatcacctcaatgaaggtggtacgatggcttgcgttgctccgcacggagttctgttccgagggaatgcagagggcgttatacgccgtttcctgatagagaagaaaaactatattgatgccattatcgggctgcctgccaatattttctatggtacaagcattccgacctgtattctcgtattgaagaaatgccgtaaggaagacgataatatcttgttcattgatgccagcaaagagtttgaaaaggtcaagacccaaaacaaactccgccctcagcatatacagaagattgtagaaacctaccgtgaccgcaaggaaattgaaaagtacagtcacctcgctacgttacaggaggttgccgaaaatgactataatctgaatattcctcgttatgtcgatacttttgaggaagaagagcctattgacatcaaagcagtcatggctgaaataaaggaattggaagccaagcgagccgaactggataaggagatagaaggctatttgaaagaattgggactggttgaataattacactatggcagagatagacaacatccccgaaatgcgtccatcattcgacaatatacgccgtcaggatgagggcggaaacgaatactggagttctcgcgacctgtgcgctgctatgggctattcggcttattggaaattccaaagagtcatagacaaggctatcaaggtggcaggtgaaaaaggaatgaatgtagacgaccatttcaaccaagcggttgatatggtaaggattggaagcggttcattccgtaaggtcaatatcttccgtctgtctcgtatggcatgtatgattgttgccgaaaatgccaatgtcaaaaaagtgttggtacaacaagctcgcgattattttactcgaacaatttcgataaacgaattgatgcaaaattcgttgagttctaacattttgctgtataaaacggcgcaaggcgaggcacgaatagaagtgatattcaacagtgaaacattttggatgtcacaaaagcgtatggccgatttgttcggggtggatgtacggactgtcaactatcatcttggtcagatttacgaaacaggcgagcttacaaaagaggcaactatccgaaaaattgggatagttcaatcagagggaaaaagggatgtggaacgtacacctctgttctataatttggatgctattattgcggtaggttatcgtgtcaatagctatcaagccacccagttccgtatctgggctacatctgtattgaaggagtttattattaaaggatatgcgcttgatgatgaacgtttgaagcagggaaaacattttggcaaagattattttgacgatttactggagcgtattcgtgagatacgtacctcagagcgcagatactaccaaaagataacagacatctatgccgaatgcagtgcggattacgacccgaagtcggattgtaccaaattgttcttcaagatggtgcaaaacatgatgcacttggctgtaactcatcgtactgctgccgaaatagtatatgaacgtgccgactcggaaatgccgcacatgggactgactacttggaaaaaagctcccaatggcagagtacagaaatctgatacgattgtagcaaagaactacttgtctgacaaagaggtttcagaactcaacggcgtaactaacgcatttcttgaatttgcagaacagcgtgctcaacgccatatcattacaacgatggcagactggaagcagcgtcttgaacagtttcttgctacaatggactatcaagcacaagattcggccggtaaagtttctcaagaagaggcacgagagaaggcgtatggtgagtatgaaaaatataaagtgattcaagaccgttcgtttatctccgatttcgaccggtttaatgatggtgacaaattgttgccgtttgatatcaatcccgataaagaataatgattatggcagataataacgaaaataaagtcctcaatgttccccatttgagatttccggagtttagtggagagtgggaagagcatacgctttctgaatatttggagttcaagaatggtcttaatccagacgctaaacgtattggaagtggactaccattcatttcggtgatggatattctttcagaaggagttatcaattatgacaatattcgtggcaaggtcaatgctactgaaaaagaaatagaatgtttcggagtgaaagacggagatttgctattccaacgtagctcagaaacattggaggatgttggacgagctaatgtgtacatggataatcgtaccgccatttatggaggctttgttattcgtggtcgtaaaatcggcaattatgatcctttgttctttaagtatttgcttgctacgccattagcgcgcaaaagaacttgcagaatgggagcaggagcacaacatttcaatattgggcaggaaggattatccaaaatatcattatattttccatcaattgaggaacagagaaaaatagctgaatttctatctctcattgacgaacgaatagcaacccaaaacaaaatcattgagaaacttcaatccttaatcaaaggacttgttgacgaattgatgacagttcttttgaaaggaaaactttatccgttttcttctttctatattaaagctggtgaaggtggcactccgacgacatcggtagttgaatattatacagaaggcacaattccatttattaagattgaagacttgtcttgtaaatatctgacaaataataaagactttataacagaactgggtatgcaaaaatcatcagcatggcttattccatcaaagtctgttatatactccaatggtgctaccataggtgcaatatctataaatgaatatccagtttgtaccaagcaaggtatattgggcattgttccgaacacaaatatcaatgtagagtatttgtatttgctgatgtcttcttcttacttctcaaaagaaataagcagaattattacagagggaacaatgaaaactgcatatcttaaggacatcaatcatatcaaatgtcctttaccatctatggcacaacaaaagaatataacaaacttaacatcctcaatagaggaaaaactgtctatagaacaggaacttttaaggttcttgaatttacagaaacaatatctattgcacatgatatttatataaacaacatacgcagcaggtaagatttttgtgcgcttagtgatataacaaggttttgttccacaactaacttttgctcgatgttatgtagcaatgatgcaatccttattcgcttttcaatggatggatagaataattttgccttcccataatctttgaagtagatgtgagggatagccattcctgttatatatggagtgaaattgaacgccataagtgcataatacaggtaaagaattgagtagttttctttggctgttagatagttgagtgttccaattacagaaaaatggtcattaacatacgacaaagaaccaacaccggaaccatctttgactattaaaattgattcgccattataagcatagttgttggtatagccaataagtccagttgcaccatatacaggatatgagccagtcacagatacgcaattttcttgcaatgtggatgaatggcattcaaggcaatcacacaagcgtatattgggagttcctgactgtgtaagttgtgctgcaagtcctttgattaaggattgaataacggaaatgtctgcgattagtaaatatttgttcgcacgaaaagatttgttagaaactactatatgcttgtcgaatattgcgacattgaaaaatggttacgcattccagagtggcaagtataatgcactgggcaaatggaaaatcctcacaataacaaatgtgcctggcgagcgatatataaacgatgaagattgcaattgcataatcaacttgccgaacgatatacaagaccaccaagtattaaaagaaggagatattttaatatctcttacgggtaatgttgggcgtgtttctctttgtaagaatgggaactatttactcaaccaacgagttggtttgttacaacttgcgaaaaatgtaaatcaagagttcctatatcaaattctatcttctcaaagatttgagaatagtatgatagcttgtggtcaaggtgctgcccaaatgaatattggtaaaggggatgtagaaaactatgtgttaccgtattcctcaaatggcaataacattctttttgctgcaaaaatactacattcatacgatgagtgcatcattaatgagctgcgaagactaaccttgttaaccatgcagaagcaatatctccttacccagatgttcatataaacatctgggacaaaagatagttcttttgcctattgaatagtttaagaactgataactcattgtcgattttcgcatcaatgccttgcagtgttgacgcaattttcatattgcgactatgtccataagttggaatcattattccgcgaacaatatcagcgttaatattactttgtgtaccagtttcaagatatttgtggatgtggcgatacttaaaatatgacaagtagtagtacagataatccaataaatctttgtctctgagctgcatcgcaaacattgcctggcttgtagtaataggtacttcatttatagttaccaagccaaccgatgcgtacattgatattattaaactatactctggaaccacccatgccgaagagttctctaatccacttcggctcaaatgattttccgtgtatcggacatacttaccttgctttgttatatcgttaatactcaagaatggtatttctccattatagtattctttatttgtagaagttggagtgccgccagccttaccttttgagaacaaagtgtctaatctattccatccattaggcttttgagcaaatgcctgtttactaatcgcagactttagttttttcaaatcctcaatgattttgttttgggtagcgatacgctcatcaattaaagataagagcttcgcaatttgttcctgttcgttttgtacaggaacagcaactttaatcttgcgaatttcatttgctgagatttctaagaatgttgatccacaagcatttctaatcaaatcttttttcttagtttgaatcaagtagtatagaaaatcaatattacattgtttcgcaataagagattgaaaaccttgatttgtagtacattcatttgatgcaatagaacattctcctaccgtggcacgagaacttaataatatagtgtgtaatggtaatagctttgcacttgaattatctaaaccatctcttgtaatagttcttttgctaaagtctacatatttatttttaccgatttcacttggagtaaaccattgtatatctccaccccaatatgatttcactgtagtatcaggtgtgccacctccaaccactgttgctaaatcatttatggtgtacttgttccactctccactaaactccggaaatctcaaatggggaacattacctattatatttctctaattattagaaccaattaaattcaaaattatgattcagaagacaattagagaaatttcggacgcatggcgagagaacaagcgaccgtatgtgaaacaatcgacattggcagcctacatgttgattcttgaaaatcacattttgccaaagtttggtgagagtaacgaacttcatgaaaatgatgtacaaggctttgtgcttgaaaagttggaaggcggattgagcgtgaaatctgttaaggacattcttattgtcctaaagatggttatgaaattcggggtgaaaaacgaatggatgaactattacgaatgggatattaagtacccaacagacgttgctggtaaaaagttggaggtcttgtccgtggcaaatcataaaaagattctgaactatattcagagccacttttcctttccgggacttggtatctatatcagccttagtaccggtctgcgtataggggagatctgtgctttgaaatggagcgacatcaatgtatatgacgggattctaaccgttaaccggacgatagaacgcatctatatcatagaaggagagagaaaacatacagagctggtcatcaacacgccaaagacaaaaaactcttgccgtgaaatcccgataaacaaagaattgcttactatgttaaagcctttgaaaaaagtaattaatgacgattattacattcttactaatgatgagcgtccgacagagccacgcacatatcgcaactactataaaaggcttatggagaaacttgatattcccaagctgaagtatcatggactccgtcacagtttcgcgactcgctgtatagaagtcggttgtgactataaaacagtcagcgtattattagggcattccaacatttcaactactttggatttatatgttcatcccaatatggagcagaaaaagcgttgcattaccaaggttttcaagtcactgggtaaataaagttatgtatagagcgagggaattaatgctgtaatttcttcgctcacaattgttttgtggttcagaattatgttgtatatttgaatgttattaaaaatattacttatgagaaagggtttgatattcttcttgggaattgttactgggtgtgtattaacaattgcagtactttttgttataggtattaccaattcaaatgctaacgaatcggatattacgattgccgagcaacagacggtatttactaccgcaacaaaatttgaagtttttcaggttcttggggatggtgctttggccaattgtgaggagaaagggcattcaacttcattttttactgggccggtcgtctatattgtgacagatggccagaatctgttttatgatgatcaggtaattgaagtacctaaaggtaaaaaggctatgcaaataggaacatttcgttatgagaccaaacttggtgaaaaagtagttcctgtaataaaatttcaataacataggcatattataaaagtctcaactggtagcaatctctatccgattgagacttttcgtttatttacctctatctaaaaacttctgtactattaacgctataccaattcctaaaacggcaatgagaatacagcagataactgctttccaaatcaatccggaatgcaaaatctctgcattagccactatcatgcacacgaaaaaagaagacagagcgactacaatgataatcaaaatgtagaatgcggtagccgggatatggatagcattgtcggctttttttattctccgctcggcttccttgcatttgctttcaatctgaccaagaaaattgcagagaagtgttgctccaaattcaattgccaacttttgcatttcttcagaaatgataggtttgcactttcgtatagagccggacagattttcaacttctattctcagcttatatacattgtcattcaggctggcaagttccttggcatttacatcgagtagtcgtttttcttcttccagatattcattcttgggagtggtttttatggattccacttcactcatttctgcggaaaaatcaaatttctttttcatgggcttagcgttttagtcctgttttcggtttcttccctaacgaacggctggcagcacgagcgcatctgcgagcccattgcaaatcgtcttcgtccttgtctctccacggaagctcgctttgcgaaccttcaccacctccaccggttgttacattgggggtatttatcagtccgacaaatatagctacagccatatcggtaagttcctgacagttggcaataaacctgtaatcaaattcgtcattgaaacagtcaagtactttttctgggatatagaatttgtaatccttgccttcatgactgaggacataggaaatcatatcctgactatatgtgagatattgggtatagtcaataggggcaaccttatgtgtcgctacctgttgaacggtttgggaagtattatttctaatgacggaagttggctgatggtgcagtctcttccatgttgcaggaagtttcgagaccatcaggttcctgccgattcccaattctgaagccttgtatttggtgtttccattcatgagagcatatccacggagaagacctttcttgtcctccctttcatggacggtataacctttccgtataagagcattcttgtagtcatcccatgaccacaatggcattgctttcagcacctccatgcagtcccgatttacttgtggaatgttgagatttcggatttgtgctgcagtcgtccagccacgtttctttgccactcgctcggctgcacgttgtgctcgaagatgaatgttgtggtcattgttgatattgccattttcatccaaacggcaaatcgcagcgtggagatgggggacttcgcctttagattccgtatgcagccaaaccgagtatttgctattagccaaattggtttggcaagaacggacttttccgtccttgccgataatcacttgtttgtcgaactcctcagcaaagtcgtgccagagcttttgccagtcctctatgtcatagaactgggtatgttcgggcgaaggactcagctcgattctgataacggagttctttatcggtcgatgctgggatagggtcaattgcatggagttccatatccccatagcgtccggttctgagggcaataggttgtccaatacccgataaatcttctccggatgttttttgtgctgtgattcgccggtaatgtaacggatgtcgtttataccgtgcgatatggctttggctttcgcaatcattcttcttcggattttgggttagacggaattttattcttctcttttactgcattcaggaactggcagacattttcggccacattgccaagttccttgagccagccgaccatgaacggaatctgattgaacattgccatgcgctgctttgtggacattccgtgtagggcggatgtgtattttatgaggtctgaccgacaatcgtccagattctgcaacagagcagcttcttctttcgtaagccttgctttgggcttgaagttatacgcacgtgataatatgtagtcacttacggtcatgctgcattgcccggccagtgattttatatgctccttctgagtaggagtgactttagctccgataaagacacttctggtttctttcgaggagtccgatgtattttcaatatcttctttcatttgaatcgttttataatggttgaataggtgcgagcttgcgagtaccgcaccggcgagggaactgagcaggcgagagcgccaatgtacaaccgtaacgcagtgaggttataccttggcatatctcgcaacagttacctgttgatgcttcacggcaagccatatcggatgcgtatagtgaactggcactcggataggaaacatagaatgaaatgagcctctaaaagaggggagaatatgaatatctcacatgatgtcttcctgccgactttactttattcttatgtatacgccccgacaataaagtaaagttgaactcaataatggtattctggattgaaggcataatctttcccttcttttataaccattcgttcgtcgctgagcaatgttgcgacctttaccgccttgttataaccgagttttataccctgcaatccgtaaccctctttcaagcgttctatataatcatcgtaattgctgatgttgccattggcaaaaacggtatccaatgctggacgatgtacattctttggaatctccttgtccggatcgaacggtcctttggttggtcgtccggtcttcttctctttgggcagataggactctaccggttcgggcatggcttcctcgtttatgcggaaggcgaaaggctcaaactcacggtcacggatatggacggcttcgaccacgcttacagctttgtcctctttgtccacttcgacctgcatgatggtttccgctttattgtttagttccgtgccgatgtgaccacgggcatgttcatcattcttgttctgatgcaagacggtatggatatggatttgcctgtcatccgtccactgcatgaatttggagatgatgtcggtggattcgctggaggaattgatgtcgtaaaggaaatcacgaatgccatctatgatgaccaatcccaaatccggtattatgccaatggcctgttcgactatcgccagacgtagtttaggggaaaacttgcgcagagccagcataatcagattatccggattcttgtattccggcaagtcggccaaacgtaatatgcgtttcaatacctgttggcaatgataccgcccctgctctgtgtctatgtatagaattttccgcttattttcgggaaatgtagaccggtaatgaagtacggtgctgttattcaatgccgatgcgacaatggctgaaacgttgaaagttttcttgcttttggcttttccgatggaagcactgaagtttcccaatgttccgataatggtatcgtccaccatcagaaccaccggggagtgttcgtatgtactcgttacgcttattgtagactccgccatgtaagcggccaattcttcaggagaaagaataatagtgtctgtcttttccatcgctaccagtttttagggttcggtttacggcgatgggaggcgagcaaagactcattctcgtcctcgaaactttgcggagccggattcttccgggaagattccagccatctatccagttcgtcacgatagatgtagagatgctttccctgttttataaccggaatatcgtctttcttgaccttgtaataaaaggtcgacaacggcattttaagatagttgcaagcctcctgtacggtcatggggacgtgcgtgttctctttggtttcgtactgcttggaaagtttctccgtaagcaggttttccatacttgcgattctgtcgcatagttcgcctaccacattcggtaggtcgttgaatgtcagttggtctttttccatattatgactattttaatcgtttaacatgctgcgaaccaactcaatgaaaccttgcagaacaatacagaccggattaattatttcgtctgcatactttttttattgcgagtcatcattatctacatctaaatggaagcgatagtcgcctttatctggtacatcaatgggaatctggcttggaacattatcccgtaaattaagtttaagatattcaagggtcgcgtttacgagttcgtatggaaatgattctttgataaaaacggctcttttcgccaagggtactcccaagcgttcaccgacattccatgccaaatggcgaagtccaggcgacctcagcggattgtctatattggaacgaatcggtttatatgactcaggttgatcgtaagccatatactctatattggaaatgagggtggcaatatcctctttggagagatagggggcagtcttgacggttacatattcccgaatcgcatccatgatttccgcttgcctttcaatctctttctttttgagttccactaatatggaatcatatttattcaaatgagaatcttgcggacaatcagagtttacagtattttgatttgactgttgggacggaggacactcctgttcagccaaacccatcggttgctcgatgggcagtatttcagtagcatccatagattctatggcgttctctgattctacaataggcgtaaatagctcgcccaaagagaagttgataggattcttcgttagccaagtgtagaaaaatcgttgcaggagaccgcacaatataattgtaaccacaaggcctattataactggagttgttattgttgtggtattgatttggtgataagtgaataggtaagtgtctactgccacataggcaattaccaataatgcaagaataaaacttatcctcttggtccgaatttgagtattatttgtcatctgctgcaagtatttgaaatggttatatggcaaagttatgtgctatattccagatatatataattagtgatgacgaatcgctcaatatttgtaaaaaataacggttagagtatgattttgggtgaaaaatcatactctgactgcagaaatcgaggacaaagcagctgtcagtcttgccgtgtcagggtgattttcttgctggcttcacgtttgttggcatccacgactttgatatacctttgagtggtggtgatactcttgtgtgccatgatgctctgtatggtgcggatgtccgtcccggcagctgcttgtagcgtcgcaaatgttctacgatacgagtgaaatgttatgttcttggtaattccggcagaacgaatccattctttcatcggtatttgcgtccaactgcgcataagccccttgaataccaaacctttcttttcagaattatagccaatcaatcccaaagcttcttcactgatgggaatgatgtcttccgccttgttcttttgcgtaatgatgtgtacacatttcccaccggcagaatagtccacgatgtcttcccaacatagcgagagaatgtcactgatgcgcaagctggtcatacaggaaaacagcgatgccgttttcagaataggtttcttgcaaggtgtctcagccaatttgtacaattcctcaactgacagggcctctttcattacatcttctgtctctatcttttccaagaaatcattgacattggtctttatcatcccattacgatagagtattttcaggaaacctctgaaagtagaccagtatcctgatgcggagttccgtgtgatacgtccgttacgccttagcttcttggcactcagcagatattcccgaaacttgttacagaggtcgatgtcaatctcttcaaaggtgcatttaccatgtacgaagttactgaaatgcagatagacaaactcccatttctggtcatgcttacggagctgcttgcgataatactccagaaagtctgccttgagtttgtacttgtcaaagaagtcataccgttcattgactaccgactcgaacctgcggcaacggatggcttcggctttctcggtcattacctcgttgaaattctgttcacgtttgtttctcggattggcatagatataaataccaagcgattcatgacggataactttcattgtctctttgtctcgataccccggataataatccagatagaaagacatcatcctgccttttagcggacgtgtccttaatgtcacggtcttgcattcatgcataatgttatatttttatggttattattaattcgtcggcgaaactctataatgtaatcatgcagattacctacagcagggattaatttttgaataatttacggatagtcataaattagactatttgcggacacccattacccggtcaaactccactttcaggaatctgacgaaccgtccgttcttctcacggttgatctgatggaattgcagaataccgtaaaccgaatcacgagagagcttgaatttctccattgcctccttgacggtatagtattccgccttgctctcctgttcggaactctttgagaggtcgaagtggagcttggagtagaatatctgcccatgctccttcttggatggaatgttgttccgatacacctgcgaacggatggcgacacgtgtcatgccgtacttctcttgaatctcttccggtgtgtaccattcagtaaggtcggaatccacctcgtatttggcaaaggcggcatcgatatgtttcttgctgtaatagttgaactggcggattctcactttcggcactttatgttgccttgtgtaagtccacacccatttagcgttgactttgtatttttctgcaatctcttcggctgtgcaatactcagagatgtcgaagtcctctttgggcacgacacgctcgtaaggtttggttttcatcatcagttcaatgtcagcacggcggatgagtgacttcttgccgctgatgcgtgaagcccgaagtttggattcctttaccaatttatatatgtactgtctggttacgcctattaactttgctgcttgggcaaaagagaagaaatcctgcccctcggcggcttgtcgaggttgcaataattcttgcgaccgtttcaactgtcgcttacgttcccggatgcgctccttgtagccaagattggaacactgatggctacaataacaggtcgttgttttttgagctatgaatggctttccgcaccattgacaaatctttcttacttccatattttctcgtttatattggcggtaatttcgccttatttctcccgatttttgtcaacacatgtaaaccactgtcaacacacgtcaactaatgcgtcactgtgacattcgggttaaccgtgaatttctgtcgtggtagaaatatgatagaaaaatatggataaaaaccgttatctccaaatacggattggaaaccgttaaaatagaaaagtcactgaaatacagcgactttattctaaatggttatggttgcttatggctatttccaagccatcactttccgatgcagcatatttacatcactgattatcagtgactattcattttaataggtacaacctctgtttttacaagtacacagaatgtagggacaaatgcaaatcgttgtatttcattgttttgcatatacgtgttgtaccgccttctttcagccattttgtggaatgtccgctatcagatacaacgtgttgaacgataggatattcccatatggatattacagaacgcttgttgagtacaaaggtagtaattctcttgggatttctgtggtttgtggtggaatttttgcgttccgattatttagggtactcgattcgttggaaaaagtgtagcaaaactgaattattcgcttgaaaaagtgtttatatgccataaatggtacacttttattcggaggaaaccgttatatcctatcgggtataattctgcatcgaacatcaatattatacctgaaatggtataaatcaatagacttggctgaactccataatgtcgagcatctgatataatattccgtcaatagcggaatgccaactttggtgaaaatgaccataataccaatggttcaccggatgattatcagttttgagatgatgcaggatcatatccattgtttttctttcagattgtacatctttaagaagtgatgaatcgttctcagcccattggttaaggttgctttttgagaatagctcacaatgtgatggcgcagtatgtgtgataactgtatcaatcaagaagcttgcacagatggtattcatcttatcagcgtcgtaaataggagcttcattcttccaatataaattgcgggaaatatcattttcttgcaactcattggagtgaactcgatatttccgtttgttccattcatttatgcgataaattcggtcaatagaaatggctccgcctacacaaaggatggaatgattacaggcttgaaggatagtataatcaggaacagcaatgaaacgtttgtaactgaatgttgttccttcgaaataagctggattatcatgattgccacgtacaaatacaatccaattgttggcttgattcattctcttggtatttcgtctaaccatttgctcatagtattctttcttttcaaagccaaaaccacaatccccagctacaatcaatagagtgtccgtcaacttgtattgaatacagagtttgaataccaattgattaaaatctccatgaatatcaccggaaacaataattgtcttggcttcgggaaaagatagtgagaatgtgttgctatgattcatcttatattcctgataatagcgcatgtaattaatcttatacttgcaagttatcagaaatcatttggagaatttcttcgtttgtggtagttgattcttgtttgttttttaatgcaaaagatgctgcatctactgcttcttttgatgtttgtggaacaagccccgaataaactatattttctatatgttctaattctgttcgctttttagaaatttgttcttttgtgtacaactctgcctttatatctgataagaatcccgcatacttattgcgcaaatcgtgcataacagcagcaaatctttcgctgtcagctgccttcttttctagattttcagctttgtatttggtggtgaaatatgttaatgtcaacgctaagaaagccattaatgggacaatgacaatttcaggtagccacttgaatatattggtaattgcagaagctgatatcaaaacagaaaatactaaaagaatctgattttgttttttcttctttgataggtatatattcgcttgacataaatgaattttgtgcgtccaaattattttgttaaaacgttcaagaatctccctgtaaagaatttttgtttgttcgtccatatgatttattcttctgtcatgtattttaaaactttgattaatacatcaatgtatttatatgtatctactggcatgttgcttcctggtgctgtcagattaaagctccaaacagggcatgaatcataaagccttttttcataagttcctattggttgattagaactttgttctccttctcttagccagtgccaatcagcaatattatgataaacaaaactgtcaatcacgattcccggaagatggtaactcctaaaatagttatcacgaatttcacgcatgtgcttacatgtgtcgaataacaaaccattgcttgcaacatttttttccttcattgcctgttgctcgcttttgggattagttgtcaaccagttgccacccatatttgaatctggatagtcgtatttcccattccaattaccccaccaatctaattgacgaaaagctggtagaacttcaaatttaatcccatcggaaaagtttatcacaacgacttgcccatctccatgaatatcactgttcggataggtttgtaaaattgcattcttcaatgcttgtagtaatctggactgaccatttccccttagtgcgtcatatttattatattcgtctcgtggcagttcgacaagtatatcaatgtcacttgtatcaatagcagtacctctaccataagagcccacatataaactatgagcagtttcgctggagctaccccaaaattccgaattaaccgctcttgttatgcgtctatatctctgagatactaacgaacgctgttcaatgctaattatttcgcctctttttctaactgtatccatattaattttatttcgtacacaaaagtacaaaaataatcccagtttatcgaatataattcgctatatttgcactataaaatcgtatcaaagaatgaaactaaatagaataaaggctgtattatctgaaaaaggtatctctcagacatggttggcaaagaaactcgacaagagtttcagtatggtaaatgcttatgcctgtaataggattcaaccaaatttagagaccttgcaacagatagcagagatattgcaggtcgatttgaaggatttgataaccgataaaaaggataggtgacatgaaacagttttcggaagctacacgggtgcagatgcctgcaatggttcacctcacccgaataggatatacttacttcggcaagttgagtgaagataagaatggcacggtctatgacggtgacacgaatattcttttgcaggtatttgaacggcagtttaagaatctgaatcccggacatgagggagagtctcttcaagttttgaaagatattcgtaaggaactgaacgatgatgacctcggtcgaggcttttacaaccgtctcaaagctgtttcgcctgtaaagctgatagactttgataacattgggaataatacgttccatttcacagccgaatttacctgtaagaacggacaggacgaatttcgtcctgacattactttattcgtaaacggattgccactttgttttgtagaagtgaagaaacccaacaatcatggtggtatgttggcagagagcgcacgaatgaataaagaacgcttcccaaataaaaagtttcgccgcttcatcaacattacgcagttgatgatattcagcaataatatggaatatgatgcgttgggcggtatcgtacccatacaaggggctttctattgtactggggcacgttcatacgcaccattcaattgctttcgtgaagaaaatttaagcggtcagaaaatagcaccgttccatcgtgactatccgtataaggagattgacaagacggtggaaaaacagatattgtctgattacaattgccaagtcattcatacaagtcctgagtaccagacaaatctcggtttcaacacccctacaaacagaatcctaacatccatgtgttcacctgaacggttgttgtatatcattagatatggtattgcctatgtccgtatggagcgtgaggtggatggaaagatagaatctaccgaccaaaagcatatcatgcgttaccaacaattgtttgcatcgttagctattcgccaaaaactggcagagggggtgaaatctggcgtagtctggcatacacaagggagtggtaaaaccgctttgtcatactatctgacctatattctcaacgatttctactccaaacagaataaggtcgctaaattctatttcattgtagaccgccttgatcttttggaacaagccacacaagagtttgaagctcgtggattggttgtatctaccgccaatacaagagccgaactgatggagcaattccgcagtaatcaggcacaacaaggtgtaagcggacaggcagaaatcacggttgtgaacattcaacgctttgccgaggataaagaaaaagtacgcatcagtgattatgcaaccaatcttcaacgcatcttcattcttgacgaggcacaccgaggatataaacccggtggctgctttcttgccaatctctttgatgccgactccgatgcggttaaaatcgcacttacaggtaccccgttgttaaaagaggaacgtgcaagttgcaaggtgtttggaaactatttgcatacctattattatgataaatccattgcggatggctacacgctgaaaatcatacgtgaagatatagaaacctcctataaagagcgtttgtctgatgtgtacgataaattggaaacccttgtgcaaaagaaagacattcgtaagtcggaaatcatagagcatccaagttatgtaaacgagttagcccgttacattatgacggacttaaaagagtttcgcaagatacaaggagatgatactttaggcggtatggtcatttgtgaaaccagcgaacaggcaaggcggctttatgatgtatttcaagaagaatggcagaagtatcagccgaagcccatcaagataaaactttccgatggttcgtatgtagtgggtgaaccggaagtggattacaaatcaaaatacagaccgctgaaagccggaatcattcttcacgatatggatgacaaggaaactcgcaagcagatagtcaaagacttcaagaaaaatatgacagtggatattctcattgtctttaatatgcttttgactggttttgatgcgccacgcttgaaacgcctgtatttcgggcgcaaactgaaagaccacaatctgcttcaagccataacacgtgtaaaccgtccttatcccggtatgcgttacggttttgtcattgactttgccgacatcaagcgcaactttaaggaaaccaacgaagcatatttacaagaattaaaccgctttaatgacgtggatgagactggcgaatccgctgccaccgatacctttacccaagtcattgaggacaaggaagagatattgaatcagatgaagaaagttcggcaaacgcttttcaattacacatacgataatgcggaagaattttcttctgaaatctccaccgaagaggataaagctgtattgctcgacctcaaacaggcattggaatcagccaagaacatggcgaacatcgtgcgtacatttggtgatgatgaaatgaaagagcaatttgccaaactcgaaatcaccaagttgccgcaactactctctgaggtgcaaagacggataagtatcatcaatcagaaagaggttttcaatacaaatgaggaaacgaaaactctaatcaatgaggcaatgatggatatagagttcactttctccaaaataggacaagaggaaatgcgccttatatccggtggtgtggaattgaaagagaaatggcaacgtaccatttcttcatttacccaaaacttcgaccaaaacgatccggagtttatctcgttgcgtgaagcctttatggaacgcttcaaggaacacggttttgtgattgacacgatagccaagttcaacgaagaaacacaggctttggatgaaatcatcggtcgtctgcaagacttacaaaaacgcaataatgtcttgttgaaaaagtacaagggcgatgaaaaatttgctcgtgtacacaagcgtattcgtgaagtgaataagcagagggaagataagagacagaagcctatgttctctttccttgacgaagagattgctgccattctcaatattataaaagaggatgtggatgctaaagtgtatgatcgtaacgacattctgaaaaaggatgcttatttcggacgcacggtgatggctcttatcaatggatgtttgttccatttcccacaaataaagcccgaaatggaggattacaaatttattcagacacgcatttcacaacagtatatcaaccaatataacgccacttacggcattgcataaagattatgtcagatattaaagaaaaaacattaaggctcatcgacggacttaaagccacctgccaatcatacggtatgggaaacgatggtaacgaatataaaattatcactcaggtatttctctataaatttctgaatgataaatttggttatgaactaaaaaatgcgaagagtgagattgccaagaaattgacgggagatgtaaaatgggagacagcatacgagaatctttctgatgatgaacgtatgcttattcagagtgccatttctccggatgttccgatgcttgaaccttaccacctgatagccaatctttggaatcaacaggggaagggggattttgataccatcttcgattctactatgaccgatatagcggaacaaaatgcggatatattttccacacagaccacagccaacacaaaaatacctttgtttgaggcgttgactccatttgtgaccgatacagcacaacgtgccccattcgctcgtgcattggtggataaattggtaaacttctcttttgaagaggcgtttgcgcaaaactacgatttcttctccagtatctttgagtatttgattaaggactacaataccgccggaggaggaaaatatgcggagtattatacacctcatgccatagcaacgattatggctcgtctgttagtgggggataatgccgatttgcatagcatggaatgttatgacccatcggcaggaacaggtacacttctgatggcactcagtcatcaaataggtgaagaccgttgtaccatcttctcgcaggatatttcccagcgaagcaacaaaatgttgaaacttaatttgttgcttaacggacttgtatcttcgcttgataatgccattcagggtgatactcttgttagcccctatcataagagcgatgacggacaacagttgcgtcaatttgattttgtggtaagtaatccgccttttaaaatggatttttccgataccagagagaaaatagctgccatgcctgttcgtttttgggctggagtccccaatgtgccagctaaaaagaaagagtcaatggctatatatacctgttttatccagcacgttatcaattcgctgaaaaaaacagggaagggagcaattgttattccaacaggctttattaccgcaaaaagtggtattgagaacaaaattcttcataagatagtagatgacaaagtggtgtttggctgtgtttccatgccaagcaacgtgtttgccaatacgggtacgaatgtcagtgtgttgttctttgataaatctgccactgccgaaaaggtgattttaattgatgccagcaaattgggcgaagaatacaaggatgccaacggattaaaaaaggtacgactgaatgatgatgagatagagaagattgtcggcacattccaacgaaaggaagctgtagaagatttttccgtggctgttacttacgatgagataaaggaaaaaggatattctctttctgctggacaatatttcgacatcaagattgattatgtagatataaccgaagatgagtttaattcccgaatggcgaactacaagcaaaccctttccgagcaatttgcagagagtcatcgcttggaagaagaaataatgaaacagttggatgctttgcatttcaacgcaaacgtaggtaacgaataaacgaggtatttatgttttgtcccacgaaatgtgggacaattagaaaattgccacaattgtttgccaattataaaaataagaaattgaactaacaatgagtaacgaaattcagtttttactatataacctccctgatgaagaggggaaggtacaggtcattataaaagacgagaccatttggtgtacgcaaaaggctatggcagagcttttcggtattgacaaatcgggtattagtcggcatatagccaatatcttcaaggatgaagaactgcagcaagatacgacagttgcaaaaattgcaactgtcgtaaaccgaggtataagaggcgaggtggaagatttggtcgatttctataatcttgatatgattattgctgttggctatcgtgtatcttctccaaaagctaccaagttccgtcagtgggctaccaggattcttaatgagtatatcaagaaaggctttgtgcttgacgatgaacgcttaaaacagggaacggcagtattcggaaaagactatttccgtgaattgttggaaagggtacgttccatccgtgccagtgaacggcgtatttggcaacagattaccgatatatatgcagagtgcagtattgactatgacaagaactcgcctaccacacacgatttctatgccatgatacagaaccgctttcattatgccattacagggcaaacggcagcagaaatcatctacactaaggctgaccatacccaagaacacatgggactgaccacatggaagaatgctcccgatgggcgtatcttgaaatcggatgtgtcaatagccaagaactatttgcaggaaaatgaaatccgtcggttggaacgtgcggtaacggggtacttcgattatatcgaagacctcatagagcgtgagaacacatttaacatggagcagtttgcaaccagtgtcaatgagtttctgactttccgcaaatatcagatattgccggataaaggacgcatttctgcggcacaagccaaggcaaaggctgaaagcgaatacgatattttcaataaaactcaacggattgattcagatttcgataaacagattaaaggaatgttggataagtaattcttccacaagttgtggaaaggttgtactcaatattagaaattatgaagattaaagatatagttcgattccattctgaaaccacaatgcctattcccgatgtggtttatcatctttacagccttccctcgtttgataacaaccaaacgagggaggaacttttggggcaagatattcaaagcaataagtttaccgtacctaaccgttgcatcttattcaacaaactaaatgtgcgctttaagcgtatttggcgaatcgattctgatgaggaccataaaatcgcttcaactgaatttttgccattaattattgatgaaaacaaggttgattttgactattgcttttatctgttggcttctcctgttattaccgactatctatgcggacaaaatgcaaatacttctgggagtcacaaaagaattgatccgacaaactttttcaatataggaatcaaactgccaccattggctcaacaatacgagatagggaaactcctatcttcccttgacgctaaaataaaacttaatcgtcagataaatcagaatttagaagcgatggcaaagcaactctatgattactggtttgtgcagtttgactttcccaacaaagatggcaagccgtataaatcaagtggtggagaaatggtatggaatgaaaagttaaaaagaatgattccaaaagagtggacaaatgcaaacatttatcaattagcaagtatttcaaaagaaacagttaatccacaggcacagcctaatgaattattcaaacattatagtttgcccgaatatgataaaacaggaacttacgcagaagaatatggaatagatattcaaagtgcaaagtttatagtcactaacaattgtattttggtatctaaacttaatccttggacaagtcgagtaatctgtggaaatagaggatctaatcagatttgttcaacagaatttgttgtatggaatcctgcttctctgaaaacaaaaggtttcttgttcatgttggctaaaagtgcaaaattcattgaatactgtacgcaaggtgctactggtacttctcatagccacagaagaataaatccagaacttatgatgaaatttgattttccttataattctgaaatagcaataaaattttctctactgattgaaaatataatagtacatttacataataatatcgcacagctcaaagttttgactaagcagcgtgacgaacttttaccacttttaatgaatggacaaataacaatagaataaaaaatgtctcgtatactctacaaatatttagatatagttggcgcaaagagcatgattggaaaccggaatctccaattcactaatgcgtctcaactgaatgacccttttgactgtcatcctaaattaattgactactcaaatgtgccggactcaaaacttcaaggatggataccaaaggattggtgggtagagaaagaggaaaacgatgcattcaatttgcgtaatgatacatggctgtgcagcttgtcaaaaatcaatgactctatactcatgtgggcacattattgttataaccacaaaggcatctgcattggtcttgatttggataaagtactagaatctgttcctccaatgtttggctcaatatacattaatcctattgtccttgatgttcaatattgtaatatcatcgaacgtccaagcgcatataattcagcacaggatattttcaattaccaatggcaaacaaaagcgaaggagtgggaatatgagcaggaggtcagattagtaatgcctaaaccaagtgctatgtatgcagccttgactccaacacaagccaaacatcctaaggaaacatgggattggcgagagatacaccattatatgccggtgaaaggagaatgttttgagtcgatctattttggtgtcaacatagatgagcaagagaaagaaaaaataattcagtttgtccgtaagaaactgaacccacacatcaatctttaccaaatgcgtgtatatgccgatgcctttaagctacaaccagagattataaacctctaaattctgatttatctgctcattgagtctgattttttggtcaagattcaagaaaaatgtgccaatgctttcctccgaacaagaaagtgttggcatttcgtatcttagaatttgctctttatctccacgaggcattttacttcctttggctccttgcattacatagtcaaaaaaagaatcttgaagtagtacggcataaagaaaacttggtgaatgtccctctttagctctaaaaaccaacacatcagaagaggctccaccatctatatctgcaaaccaaacctttttgagatatggtctgatatttgctattaatacatcgccacgttgatagcgagtgagacaacaagactgtggcggaagattggttgcaatttcccgtccttttttgttttgtaatatgcagtctgtagtaacatattcgcgtaaggcaatatcgttactactgattttgtcggttacataatctgcgattgatgataacttagtcatatacatcctgttttggatgcaaagttacgcattttcgggcagaatcttgcgcaattacttatcccaagtatttcttatgagccaattttacattattttggttcacaatcgcataatgcagtgttgtgtcaatacgtacatgtccaagtaagcgttgcacctgttcaataggcatacctttgtcgatagccattgtcgcaagggtacgacggaacttgtgaggatgaactttaggtatagaaagtgcttgtcccaatttccggatttttacttctacgccactgatagtaaggcgtgtgtgaggagaatggagtgagacgaataaagcaggattgtcgtcagtacgcccattgaggtattgttgcaaatgcagtttggttcgggcattgaagtaaacaacacgttccttatttccctttccgaataccacacactgtcgttcgtgaaagtctatatcttcacggttcagttttactaattcacctacacgaatgcctgtagatgaaagaaagtctataatagcaaggtctcgtttgttagtgcaactatctcgaagttgctccaattgttcgtcagaaagtacctcttttacaagtgaatcagttttaaccttgtggatacgtctgaccggacttttggcgatgtagtcttcatcttctaaccatgcaaagaaactggaaaagatgcgtcgcatattgtcaatggtaactttactggattgatgttcttcttgataatcggatagataagtacgaatgtcggatgtggtaatatgacagatagccattgaaagtgtaactaatagccgttcaatggtattacggtagtacgccaatgtcttatccgaacacccctctattttctttgctgatataaaagagttaagaaactgttcgttttcttgtgtttgctggtacacacactcctcttttttgataatctcaacgttatgcagttctgatgtaagcacagctttaagctgcgccatttgtcggcaatctaagtcacgctgcatcttcgcaactatcgcctgaatgatgttttctttcataattctgatatttacgtccttatatataatataagagactgctaaatcagaatttagaggcgatggcgaagcaactctacgattactggtttatgcagtttgattttccaaatgaggagggcaaaccatacaaatcaagcgggggtgaaatggtttggaatgagaagctcaagagagagattccaaaagaatgggaagtcctaaatttaggtcagataacaacttcatatcaacaagggctgattcgatcaaacaatcagctttctgatagttctgaatttgggtatttaaaaatgggcgatttagatggtaaaggacagtactcgttacaaaaattagcccgtacaaatgctacaagtgaagaggttttcttattttcattacataaaggtgatttcttaataaatgtacgtaatagcaaagaatagttggtaaaacttgccttattgattatgtagaagaaaacacactatttaatcatatgttagtgcgaatgagttttgacaaagttacatcgttttacatgaacctactttttaatacagatttcatgtatagagcaatggatggcttaaagcaaggaacgacaaccgtcattgctttgtatcaagaagatttatatagacttccaattgttgttccaacaaaaaacgttatggatacattctctattatagagaaatctatacttaatcaaaaagaacttttaaccaatgaaattatatcattgattaagcaacgagacgaactcttgcctctcttaatgaatggtcaagtatcggtaaattctgatttatcggtatataagaaaaggagaggaaaaatcccctccttaactctaaaccatgtctcagacattcaaatccttcagtgcaagtgcataattgggataaaaaccgtccattatacactttaaaccaagtgtctgataatacttgtagtcatcatcttcggtgcagaggtatttgtaaccgtagcgtggcatgtactccttgaagaaccgagccaagtctttcaggctttcttcttggttctttttgaaattactgcgcacaatgatgatagaccagtcgggaaagttgcctcttccacagctatactcccagaagcggatatagcagtctaaatcacgttcacgaatgtccacacaaaagccgttggcatgggacatcacgctacagctttctctgtagccaaatttctcacacaagtagagattgaaatcaagaattaaatctttttgtaccataaataattgggttttaaaaattaataaataatgcgaatcagtagttgataatcatctaccttttcgcttgttaaaatgttattattcagttaattatctcattaattagttttctaatctccttgaaaatcagtatattagaagaataaaaccactcattattctaattatgattcccaaggagaaagaattaaaacttataaaactatatatgtatatctgtgatgtttacgagtcttcactcaagttctactgccagaggttcagtaacaacaatcatccaatctttaccgatcaggaactgcttactgtatatctgttctgcggagcttatcagcaatactttaaaatcaaagacatacatacctttaccaaagaatacctgctttcatggttccctgacttgccttcttaccaaacattcaattatagattgaatttgatgacggaagcaatcagcgaacttgtcaggcagttaatccattcattcaaacctcaagattgtgacagtatgaaatcattagttgactcaatgcctatcattacttgcgcgggaaagaacaaagtaggaaaggtcgccactgagattacttccaaaggatattgttcgacaaagaacatgtattatttcggaataaaactccatgcagtggctttccgtagaaaaggaactataccttttcctgaaatgctcatactttccgctgcggatgaaaatgactcaactgtattcaaaagagaatgtgtgggaaatctgaacaatagagaaatatatgcagataaaatatattcggatataccattctataaagagacgaaagaatacaaaaaactcgagctatttactcctgtaaaagctatcaaaggagaatcacctgaaataacaaaaagggagaaagcggcaagagacttgttttcaacggcagtctcaaaagtcagacaacccattgaatcattattcaactggttgaatgaaaaaacaaatattcaaagagcgatgaaagtcagatctacatctggacttctggtacatacgatgggaaaaattgccatcgcattaattaatctaatttttaactaaggaatcaaatactgattcgcataaatagagaattataaatgaaagcctcgcttacgcttagcctttttctttttcattaggcgattgaactctgcttcttctgcggcagtggcatcgtaggatgagctaccgtttagcaaaccgagactgatgccaaagctatcatcggaatgggaaacgctttgctgtacctcttctttttgttgtttggattcctgtttggcagactccaacaaagatgcacaagcattctcttccagtcggttgtcgatattcaagtagctgaactctcgacctacttttgagccggagaaagaaaagccgttatgttcaaacttgacaccttgtatttcccgtgtagtccggctgactttgaatttcatatcaatctcccggtcggcaagcgcatctttcaaatcatcccaactatgagctgtgggcagttcttctttcaatgccttgtatatctcgtgctttgccttatcgtatgggcgcaagcgttcctctttgatatggtctttaccattggcaaagtgcaagcgatatttggcggtcagcattttgcagactttctcattcttacggaagtcattcttgtcgctaattgttttaccgtcattgtccacccggttgaatacgatatggcaatgcggatgctcacggtcgatatgtcgggcaatgatgtattgcgtattttcaatacccatcagcttcatatagtcgtgcgctatgtttagcatcagaacatcatcagactttagccttgcactgtcttctggtgaaaagttgagcgaagtgtgtccgacaatattctttaccttgtcattgagtaatgcctgtaactcaaattgctctgctatttgttcgggtgtaccttctactccggccgcttctaatagcttggatttttcctctttgaggacatagcggacacaaccaccgaacgatgtccctttagtctgtttacctatcatttttcagttgttttataagttgattaatatgctgagccatttcctcgcatctatccgcaacggcaaagaaaccataggtgttcgcttgtcttgccaactggttaagattggtactttcaccaatcagttgccggatgatgtgaatatgctcttgcgtgattctttcacgtaccgaaccgttctcgatgagcgaacggatgacttcactttgagtctgcttgctccgtctgcaaagcgcaccaagccatgcgtgttgctgatatgacagacggattgttattgtatatttcttttccatttgaatttgttttagtgaataatttgtgaccatcgggagctgcctcctcagactttttgaggagcaagtggtcgggaaatgtaatacaccgacattaacttgctacagtaaaaaagtctcaatttctctctctgagttcaaagtctgaatcctcgtttcttaggtggtgaaaccttcggttgtggagtgccttgttgtatgctaatgagtttcaaatcgaatgtttttatcagtattttcaaggcaggattcatccttatcatctgttggaggatagcttcatcaggcttcactttgagcagataatcggctatgtcgtacccctcttttcgctcgttttcggtggcgttggcttccagataatcgaacatctgcaccttaattccgtagcttttcatcagaccgattttgctctgccaatagtctgtcgctcctaaatcgggaaataatacaacgcttcttccagccagaacggataggctgttggcattgaagcaaccgttctttccaccggatgctatccataggaattgcggtagatagtaggaagcaatgagtgtcgttttctcactttcgaccagtgcaacaggacggcttttgtcttcaggaagcaaatgctcaccgaagaagcattgcttcagattataatcgcccttgtgcagtacggagtgtacccatgtgacatgattgtatggctcttttatccgcttgccagtttcggaattgtaaagcattatcttacccgtgcggactttattttggttatccgtctgccagaatacagttgcaccgtcccaatacttggatgtaccaaccttgtatctcttcatgagctttaatgtttctgtttctccgaactgagccgatagaaattgaaacaacttgtttgcaggatagccacgcaatgattgattgactatatccaaatcaatgtaggaagtggctatgggttttgcttccttaataggggcatagctcctgaaactattctctgcgaacttttctttctcagacgggttctgctcaaagtaatcacgaggcgtgaagtgataaccacatttctgctcatggtcacaacgccccacgtattctgggaacttgatttgcttctccgtatcgatgtactttgaaaagcatctttgacggtggcagttcggacaagtatgccgagtgctgacacctttgtagggttctaatatgaatctatgtgtactcattgtatgtttctttttggtgtgtcacttttgtcgttattgtcgttttcgtttggaaagtgtcaaaactgacaaaaatgtcacgggttaatctttgaatattctccatgcttctctttgcggaacaatgttccgatgttatcattgagaaagcgttgaaatgtgcgttccttcattccattttgctcggctatctgtatagcttgggcagttgtaaaggatggaggaagtagattgactatcgcctgttgttggctgttgagcatgttctcattgagtatattttgaacgctcaatgcggattccttgaaatactccgtcagtttaatggctcgttctaccgtcaacaggtcgatatatgttttaccacactctccgcaagtccatcgtgctaattggataatcaggcagaaacggatgatgtatatctccagcttgcaatagatactcacaatgatgtcatttgtctcttggtcgcacaattctgagaagtggtgctgccattcgtaaagccgtctcttggcatcctctgtgaaaagaagaatctgcggttctatctctccaaactcattgagggcatactcttgttgtatcagtttgtcaataatggcattccattcttgttcgatgttctccggtagttccttgtcattccaacgagccttctgttgcagattgggcatcacaaacagaatgcggtcgatgaatccgttactggaacgttcacctttagccaactcactgagaatcttcttttgaatagtaccaataactgagatatacggtcgcttgatgaagatggaactcttggcattcttgcggtcggatatagtggtcttggcactgaacaccgacagccagaactgttcttccgaaccgttgttataacggttgaagttcttgaaccaagcggataactcgtcagcccacaagcataaaccacgtttgttttgcgcatggataaggctcaaaccttcaggcgttacatccgaaattaagaagcgtttacgaactggctcctgaggaaattgttcttcaccgctttccgctcgttctttgcggctcatactcatcagctcatcatacttggcaagagccttttcaaagacttgattctgctggtagtcataatcaagaaacggtttcatagcaaaactgagcggatggcttttgtttgctcccggtcttccaatcaatgccatatacagaataggactttctatccagccttgcttgatttgggcaagatgcgtgttgccgatgccaactgcaatcgctgtaagaattgcagaggcaatgtagtcagtcgggtagttatggcattcgtgaacctcactgatgatgcgttggatttttgtcgggaatatgctgacaggaaaatcagtgccagccaatcgcatacttaaatcaaccgcttcgtcaatgatggatgccggattaatagaggatgtatccatagttctactcattaaaacttcatggatgatttggacttatgacggacaccgccttgcatatttgccagcatctcctcgtaagtctgttctgcactctttctacgcccgttctcaatccaagaaagaagttcgtcttcatagaaatagagtttcttacctttcttataggcaggaagtagtcccttgcgtaccaatgtatatatggtaggcttggcttttcggatgatacggcaagcatcttcaatttctaccaatacatgtttgtcagatggctgtggctggagttccgctaccagctttttcaactcgatgacctgttcggtcagataacctatcgcttcgggcagcttatcaaatgttactgtttctttttgcatacgcctatcgtttttaattgttcgacggcaaaggaaacaggtgtttcaatggtggaatcattcaccaaaatataactgatgaataactttttgatggtggttgacagtgatatgtgatgaagtaaacgataatggtgttgtgcaatgctgtcaaattgacattatacttgccgtatatctgccaattttgacatgttatatcttattattgtaaatggcacgtaatgtgctataatatataaatacagaatgattaaagttgggacaagaccgatgggtacgttttatgtaaagtacacatacgtgttccacacgcagggtttggctgacgtgtgaagagtgattccaattctccaaacatcggataataatttaacaagctttattgtccagagtgtaacgagaagaagagcaatcttaggttctaataatgtgcaatttgtcatacttgatagtctgtgcaaagttacgaatttcattctatcaaagagtagcgttgtctattacgtaagtaagaagcaacatcaggcatgtatccatcaataggtatgctacgaccaactttaatctttctttaatatgaaaactatgcagatagagtggcttaagtttaaaaaatatccccatataggtaaaccgctagttagttcaaaagatagggtttgggtggaaaattatgttatagattctcaaaatatagttcgacataagtttgttccattattacatagagtgctgactcagagaaaattcagaccagatgaatctgctctcaaaaattcaagtggaaaacgaatacgaacaaataaaggtaaaaaagagcgtcatatatattatccttcacatcttgattcaattatatatagctactataatgatattttgacgcaagcatatgaaaaatatttatctgacaaagattatgcttctgttgcggtagcgtatcgtaagattcctaaaaacgatttgttggagggtaacaaatgtaatattgagtttgctgctgatgcgtttcaatttattagaaataataggcatcgcaggttatcagtaattgttgctgatgttacatctttctttgataatcttgaccacagattattgcacaagcaatggaaaaaggttttgaatgttgaagatttaccagtagatcattataaaatttacaaaaatcttgttgattataaatatgttaatgaaaatgagttgtttaagaggtttcagcataaattgatagttgaacgccataaacccaatgatgcaagtagtatagagctaaaacgtaaatacgttagtaagatatatcatttgcggcatgagaatgttgtcgcatattgttatgctgatgaatttttcagagaggctactgacctaatcagagtagataaaccatttaacaaacaaattagagagaaacaaggtaaacaaaataaaagaggaataccacaagggacaccacttagtgcaacactagctaatatttatatgcttgattttgatgcaaagatttatgaagaagcatcaaaaccgtataagaatgtgtattatcaaagatatagtgatgatttaattcttatttgtaatcaggaagatgaaaaatatttctacgacctaatacgtgaagaggtcgaatataaagcgcatttggaaattcaggaatcaaagactcatgtttatcgttatgagttagaccataacaatgctttggtaggggggatttttaaagatggagttgtacataccaataagcagttagagtatttagggtttgtatttgaaggagataaggttaaagtcaaagcttccggattctctaaattttataggaacatgaaacgttcttttagaagaggtattcacttcgcaaaacaggcacatattccatcaaactcattatttgaaagacggttatataaaagatttactcatttggggtcaaaacgaaggttaaaatggattgcagattgtagtagtccgacagggtataaacgaactacattttatgattggggtaattttattagttatttaaataaagcaaatgctgttatgaaggaaataaatcagggtgataatatcgttaaacaatataggaaagtttggaaaaaattccatatgttaaaaaaacaagcatataaagagattgcgactcgtaagctatagtaactgttgtctcatttagctaatatctttctatccagtttaatcttacactctgattctgtgtgcgacattttacgttcaatggtagatatttccgaatcatggagggtgtgagcaaataccctctttatgaatgtggcagtctgtaaacgtggcttgccaaatgctttgccgatattccatccaaagtgcatgatgtcaatggtctttaacagagaatcaacctttatcggttcgactttaggcaaagaatctgacaggtagtattctgtaacatattcacataaacgattaaggtctgtttcgttaagatagagaaccaaagtttgctttgtatatgtgagaactttatctaatttttctttcgatgctcgttctttttcagccatagcgttagcacggtaaatctcgtattttgttggctggctggatttttctatagaagtattattgataatagaaggagtggcttcttcttttggaagttccgccacatcttcattggattcagggagtgagggaatagaaacttcttctgtggtgtcagatgtagtttcgatttctggttcagattcggaaacgataggttctgtatctatattattttcaataagttcctgatgctctattggagtttcaattaccaccgccttattgcgatagccttcaaatctcataaagcatttttctattgtaggggaaaggagttgtctgaataccatttgcagattgagatagatagctcccatgataatggtgcataccaccaaaatgaggtaactactgaactcgtcccaaccatagtggagtacggtctggcgggctaaaacaccaatgattgcgattgtaccaaaaacaatcagatgcaatgttatatgttctatctttctctgttccataatgagatgtattaatcgttttgtgtacaaatatataggattaatttttgagaaaatccatagttttgcttgttaatgggcttttgacgatatatttcatcgcttttcaccacgttacgctcctaataataagcgtattgcaaatttcttgcttttggatgaaaatagttgggtaaacaagcttatgtatcttaaaaacaaaaattatctgcatcattttgggtaaacaatgcagataatcaatagggtatagaggtatagcttattagcaatacaatgtatggtttgtacccttgttgagatataataggatgttatactcttgtttacgagcgactttgtttattacccatttcctgaatgcagcggaatgcccggtgtctatttgataggatagagctataaccatatcgagattatacacatcggtattgttcccattattcaatttgatgtacttgcaaacttcttagttctttaaaatattagctttcagaattctcttaattgctgcatggatagttccaactgttgtataatacaagtctgctatttcccaagaggtcatccatatttcaccatcggagatatgaatgccttgttcgttgtttgttatgattcctcgtttcatagctgcaatttacttgagtgatattttattagctgtctctcgtttcttggaattgaccaaatcggcatatatttgagttgtggatacgtttttatgtgttagcatctttgaaacagtgtaaatatctgtacccaaggatatttgtatgaccgcatacgaatgtctgaatccgtggaaggttatcggctttgttattcctgcttttttgagccagcttttcagcggataattaatcatgctccgtttcaactccttgaatactttgcctgttccgggcgtaccgcatagttcgtaggcttcgtaactgatgggaagtgtcacttccgtctgggttttctgtgttctgatacgcaagcaatagccttggtcgggagcaatggtaaagtcttcccattgtaggttgagaatgtcactgatacgtaaacctgtcagacaagcgaatagagaagcggccttcagaacagggatgtcgcaaggagtggctgcgagttgtttcacttcatccaatgtcagatactcttttttcacatcttctggctcaatcttatcaaggtaatcattgatgttctcacgaaaccatttgtcccgataggcaatcttcagcaatcctctgaaagtggagtagtagccggatgccgaattgagtgatatggggcggttgttgtgtttgagctgtttggcattcagtaagtattcacggaacttcttgcataagtccacattcacatcaccaaaggagcattgtcccttgacgaagttgtggaaatgttgatagacgaattgccatttctggtctttgttccggcacatcttcttgaagtaggcaaggaaatcggctttctgcttggttttatccaagaaaccgaactcttcattgatgagcgattgtactctgatgcagcggatagcctctgccttgttcaacatatcgttgttgaactcacgttccatttcgtttttgggatgggcgtagatgtagatgccgaggtattccctacggctcatctgcatcgtttcggggttacggactgccggataataatccagatacaaggagatacgattattccgaatcgctctctgacgaactgttacttttgtacacgtgtgtgacatactgtttaatatttagagttttacatttgtttggtgcaaaggaataaggtgattcaatggtgggtacattcaccgaaaaataacttattcaatctttggggctgcaagcaacttatccagttcaggcttggagataagtgtgtatttgcctttcttgacctttgggatattatggtacttcgcataatgatagagctggtcacgagtaaggttaaatttctccatcgcttcggctaccgtataatattgcggttcttcgggtgctgcaatgcccttcgctatatccacatgcttcttggaatagtacaccatgatgccctctttcttcttgggaatggcattcttggaaacgaaacagtagatggcggataaggtcatgccaaacttctcttgcatttcctgtgtggtgtaccattcggtaatatcaggattcggggctttcttggcgaagtaagcgtctatatgtttcttgctccaataggttttgccccgattgaaagtccgggggatgttgttcttcttggctaccgcaaatatccaagactcgtttacatggtatttctctttgacttctgcggtggtgtagaagtctgtgataggggctttctcttttgattgtttgttcgctgcttcttgaacaataaagtctgtcatatcttctatgtcagctctgcgaacaagtgttttcctttcgaatcggattaccttgattactccattgcggatatagcgatatatggaagtgcgcccaacgtttaatagcttggctacttctgacggaataagatactccttgtttagattgggaggcgtttttatacttttccctaattcgtgttgcagactttcaatgcgctgttttctaactctgtctttataggcaaggtttgcgcatcggtgtgaacaatactctgtggtggtcttatgggctgtgaaaacagcattgcaccacttacatcttttctgaatgtcgattctactactcattttatttatccgtttattttgccaaatctgtttcatcgcgtaccaccacgtaccatgacgtaccaatgtatccacgacctttccgacctaaaatcggagagtaacaagcgagcaacaaatacggtacaaaaatgagctgaaaaagccctataaacgataactatcgcttataaggctaaaaagaaaggcgctcaaaatgaacgccttaataatcattgatgatatatgctaatcgttggtaatcactacctatttcccgatgcagaatgtttatttgcccacgcaaacgatatttgtgttgtataaagcattgtatatcaatatgtaaatttttgaagaatatttttgggggacaaacgggggacaaaatttcgcataccaaaagaaagaaaaacaataaaaccacttcccaaaaaaacgtgttgaattgcaagaggcacggtttgtccctcgcaattattttgctttgcctctcctcgtccctcggatgtagagttagattctgtattatttcagaaacgccaaaagccatagtcttgcataccaaaagaaaaaagcaataagaccattctcgaaaaagcatgctgaaatgcaagggacataatttgtccctcgttgtattgttgtttgtccctcgcttgtccctcggacgaaagttaggtttgatgcagttaccaataacgtgagtaaagtaatgattgaataggtttagtttggtttttgtatatctaatcaagttctaaactaaactgcttgattttctcaatttctaaactcttgattgctttttcttttcgtcagcaaatcctcctttttattcgctattgcttgaaatgcgttttgccgtttatagtgctcctgttgcacacctactatcctttctcgtcttcacatcactttcgggttggcagataagaattgtgtcgcaaaggtatatatcccgtctttcttccttgcaaggtcaagcctatcggttcaaaccaaaatctccacactcggttttcaactgaggtcgtattttgtctgtgaagccttgcaggaagagccgggacaccttgcaaagcgacataattttaatcaaacccgaaagtagttgatgccaacagagggaaaagtaaaaaatcaaatcaaaagcgattatggcaaattatgcgaccaacatcttctacgcaagtacggagaacgagaaagaccttgataaggtggagaactttttggaagacacattttgcgactgttaccttgacaggtcggaagacagtatcgagggcgagttttcgtcaaaatgggactatcccgaaaaagagataaacaagatgatttctcttttggaggacaaagacaaaatctacattcgagtgctgacacacgaactatgtaacgagtatgtgaacttccaagtgttctctaatggagaatggtcataccgataaccttaaaaaactcactgactatgtattacgaggacgaacaagatacggacattatcgggtgcttatgcacattactgactccttacaaggggcatacagagggagaagtcgttggagactacggcaacgagatagtggtaaggctcaccaatggcaaggaggtggtggaataccgggatgaagtgctaatctatgactaatggaggattgctttatgatgacaccaatagcgacaaggtttgtggattgggatattcccgaactttcaaccctgcaagacagcaaggtctatcaattgagagtgcaactcaatgagggtacgccaatgagccgacaacagaaaaattggcttacgaacagcgtgaacagcaacacctatttcaaaagggctattccgctaatgggctaccgctttgacttctctgacgtactgaaacgctactttgtcaagcaatacggacatatagccgaatactatgctgtggacaagaccgctttacggacattcctttgcggtcggattgatgaaataattgagataacagattaaaagaaagattatgctgtacgattacagaaaagaaagcaaatcgcctatgcttctgactttggcgaatggcaagaccattgagggcgaatttattgatttgcggattgccaccgaaaccttgcccaagggtaaactgtggtatcatatccgacatacggacgatgattggagtgaaccagcctctctgaaaaacggctgtgtagtggtcaatttctgtggtacattcatttgtgaccctatcattgatttcccttgtggcgaggaactggagataacagaatggtcatacctgaactgaccgacatctggcagaatggcaatgtggggcaatgctccacattgttgtgtccacgccatttggaaatacatttccaatggcatcaacttttataattggagcttgcaaggcaagccgtttttcctcttatatattcatctttgacagtcaagtctccttttgtatatatggcatttcatatttcgcaatggcgatcgggctgctttgttcaacgagcaccggacttcttgccattgttttctttgccttgatttctccggttctgtcggtaaggtagaacgcgactattctctggcttccgcgatcttcgtgccattctgttcttcggctatcccttccatagcaaaatacctttggctgtgcagcgtcataacggattcagtattacggcatccacattgagaggacatactggattcctcgtctcatcactctgctcctttgggatttacagccgaagcgtacctgaaactttgtgtctgcggacggatgctgtcctttgtctgcgaaccttgctcacttgtttattcaccaatccatatcgttacagcttttggccgtgttattcctcatttttccgttgcaaagttagtatgcagccgggtacggctgaaagccttggtcaatggtgttgcttcacaaatcttcctttatctggccggaggttttgacggcttacgctgacaaaaataaagagtatttgattgctaaccttgtcgcaaccctgtaactgcactcacttatattggcagcgtaaaaataatttaattaacaacttaaagcattgtaacatgaaacagattgagaacaatttcgcagtatcaggattcgtaggtaaggacgcagaaatccgtcagttcgcaaatgcaagcgtggcacgcttctcattggcagtaagccgtcaggagaagagtggcgaggaaacaaaacgtgtgtccgctttcatcaacgtggaagcctggcgcaacaacgccaacaccgattcgcttgcccaaatcaccaagggtaccctgcttacagtggagggctacttcaaacccgaagaatggattgacaaggacggcgtgaaacacaaccgcatcgtcatggtcgctaacaagttctaccagacacccgacaaggaagaaactcctgcggagccggaaaagaaaacgaaaaaaggcaagaaataactcctgcctcgttccgacaaacaaagcggcttcggtcgcttttgtttttgctcgtatgtttacttgtcatacatctatgggttgcccattataagttttcacccatcccgtcaacggcttcttctatttttcttcgagagacttgctcggctgcgcaatgttgcacgttgctcctctttcgcaagacactctgccgaaatcgcccgatacaaaaagatttgccaaccgctccaagacttcgttttctcccggtaggcaaaacattttgttatttatcgggcttgcagaagaaactcgtttactgcccgccctttgcttgggttgatattttcgacaagagggagaattaaatactgatttttaagtccctcgctatgccagacatgaacgactgtcataggctgcattctgttggttgaatcttacctgtcccgctggtagtcgcttttgctccagcctccgaatatcactttcacgattttgatgaacacccacaatcccaatactgtaatgattacgtctcccatatcactgatttatttctgattactacttgtaaagatacgaaaaaaacgcgacataaacgaatgtatggtgttaaatatcaatatgatgaagcatttttttttgagaggatgtcatctgttcttggcctatgcaattccgaaaagttctatctcgaagatgagtgttgagccaccgggtatgccgggttgcgagaacttgccatatcccatttcggcagggatataaatctcccatttgtccccgatacacatctgttgcattgcgataatccaaccctcaatcagttcgttcaggcggaatgcaatcggagtgccaccccgactgctgtcaaatttctttccgtttatggtccacccggtatagtgggctgtgacgatactgcgtggtgcagggtgcttgccatcgttctttcccttactgatgaccttgtaatagatacctttcgggagtggctttactccctcttctttggctttcgcttccagccattccttattggcttgtatgtattcttttttgctcattttatttcggcttttttaatttgtatatgatatggggcatttctttacctcggtaaacaacaatatggctactacaagattccataccaagccgttttgccactcgaatggaagccttgttttccgggcggatactacaatatacagccggtaattccaagctgtcaaaagcataggctatgagagattcggcggcttctgtcgcgtaaccgttgtgccaatatgtgttgtcaaatatgtagccgatctcaacgacttcattcccgttcattgttgttttcataagtccggcctggcctatcagttgtccgctttctttctgtagaacggcaaaatatccgataccatctttggcatatcggacgagctgtctttctatccagtcttgtacatcatcttcgctgaagccatgctcccaagcgtacatcacttccggcttacccattattgtaagcaaagtatcaaaatcatcattggtaagtttgcggacgagcaatcgctcagtttctataatgtcggcttgtatgtaattacacttgctcatattcagtaaatcaatctaatgttctgcatgctgtttctaatatgtcaatcatctcagccccgtgttcatgacattgaaccttaatccatttgtcatttgaacttttttctataatatctcccataatgcgaagtttcaaacttcctttttgaaccattttgccatatgacttcatctttgactctggtgaaaggtttgaaaactttgaattgacacttcgagaaatgatacacagatttccaaatgtatctttgtcatcccatgagtcaaaagaaccgtcagatggattttgtggataccagtgttcaacagagttacggaattcgaattcaaaatcgctgtatttgcttttattattcttccataacaagtaatccagaaagttgaacacgatgtgaggagtcgttacaccaagtttgtagtcctttccatccaagaaattctccttggttgccagtgccgctatgtcttcagcctcgtttgttaatagggctacttcatcattctcaaacagccatagaacaagctcggttatccagtgcatgacttttggggatgtatacgatactcgaagcgcagactgaatcattaaacattctttattgcgtggagcatatgtcgtttcccattctttttcatacttcaactttgtatttgaataatatgctttctttttagatgcctgtccagatgtgtgcaattccttaagactccattcgccctctttgtcttcgccagtatattctctctttatgatgaaactatcaaaaagataacgtgtttgcaacagatgaataattatcattctggcaaaattttctttgttgttcttgataggttcattatctaatgttccatatttaatcacgttttcaaagtcagcaatcaatttcttgtcatcaagtaattcgcccaaatctttttccaatgacacatcgtagaaatccacaaaaaccctgagtgcatgaagcaagaagtacgggaattcaatgatgctttcaaagcgtatatgagtatcatcgtcaagtatgccatctacattgtcaactttgaatcttggcttaatgatttcgtttatggttgcattattctccgaatcctctgtaatttctaaacagtcactatattcactccattcattagcaggccagccattccactctccaccgaaaatgttttctctttctgttcgtgagaagtgcatttgaacatagcctgtcatatcgctacaagcattccatatccgtgaaaatagttcttgttcctttctattgttgagaaatctcatgagccgggctttaaggatatcatgctgttctaattgctctccacgggtgttcattatctcgaagtaacggtttaagtctgtatgttcaggcacttctatcttatagagaatcacatgttgcaaacgggaaacaaattcatccttgtttaatcctttgtcactcgtaaacttttgacggattgcttttataccattaaggatagactgatctatattttcctcataatcggcagaaggctttttgtctgctagtatttgttggatattagaaagggtatatttagatttagagcgacaatcaaaagagagagtctgtcctaattctccttccaatgctccttctgatacaaggtattgcaataaaagaaaaagtgttgtaagacgttgctgtccatcaacaacttcatacgttttaggtttatcttgtaccttggaaacaacaagtgaaccgatgtaatagttctcggatgaatcaatatcgttaatatcatcaattaattgcgctatctctttgtcttcccacgcataggctcgctgatagcgcggaattacatagtgagtatttgtatcgaatattgttacttcatccaatatttttaattcttctaccatattaattgtatccattaagttgacgaagttgtgcatataaattgttccaattttcactggctgctttgtcatcatttctcatgtcaagtctcattcctgagatttcagtatgtctacgcgcataagcaatcatggatattacgggttttacattgctgtatttgtcatcttctatacctatggcatatctattaatagtatcaaagcctaaatgctgcatatcaattctaatcatcatagcccaagtaaatagttttttcacggccatgacatcaaagttgtgaaaacggtcgtaatagcaaagcaaggcgcagaaaaagaggtttcgtgcatggttaagtccaactgatgacgatttgaaagatttatctaattcttctgctgaatccacatcttttccgtttgtaataatcagttcgatatcatgaaatgctggattcgttacaatttcttcttttatattatgcaacatcttcatatagtgatcaaccatttcaaaaaagtcacttcctgaaatgaatggctctgtgagtaggaaataaggcatggctttgttggctctgcgcgcgtaagtgtaaccatacttctcttcaatacctttatagatgtctatatcagcagaagtgaaattaccacactttcgacattttgcccaattccatatcgggaaaaggtacaagtcgaataactctctgatagcctttggatctttcgattcccatttcactacggcattctgcatctcatacttatcgtgaatctctctaagatgataagctttaagtaaatcatgcggatatagcgcacgaccacgtgtgttttgagaatcgaataattggaatgcttcatctattctatttactgtaatcacgacaacttctagaatgttttttagggcatcgttaaaaatggccttcactgtatcatcaacagaagaaaaccactctcggatagttgtatagttgtcatgtagattcttctgtgtaattttatttagaaacttgttctttagcagattacacgtaaaatcagaatctaaatgtaatttcaataaaaggaatgatagtatgcgctgctgtccgtcaacaatctcatactcattgttttcatttctatgaagaattactgtacctatacgatatttgaaattagcgtacttacggctttcttcaatacttttttgagtatcgagaatgagttctgttatgtttttgtccgtccatttatatggccgttgataatctggaatgattagattcttccctaataacttgtcaatagaccatatgtgtggtttgctattcattatttaaaaacgaatttgattgttacaatagttacacaataaactttattcttttgattcatcaagtgttatgtgaactttagaatgtgggcaaattccagctttaaatcccttaatcacatcttttaatgagatgctaaacgagtcagatatatagtgaatgtgcgatttgtttccatattctcctggttcattgcctaataacccccttctggtttgataaaagcaatgccaatgtttcccattgttaaggattcgtgctaaaacaaattgtgaaacagttattatttctttcatttgaccatctgttaatgatgtctctccatagtgttcaatggtattttcatcgcatagataaataaatgatggtaaatctgcacctatatatttttttggtgtatcttcaaatctgtaattgctgaatttgtaccctttatcattggcatataaaaagattgtagcgagttgttctggttttattgaaataccccttaatagagaaatttgttcttttttggatagttcttcttgaaatagcaatttaatattttcgggaatttcgagagaagtagctctagcaatttctttttcagctattttttttgatgccaacattattgctattggatctttgcatatcgtgtctaaattctgttcttttagaaccattgcttctattgccggatagattgattttgcatgaaaatcaattaaatattctctcacattaacgttttctacatcgtccatgacgttggcgataacatattttgagtcgttattgtaaattttactatgtcccataattagttttctttattctttcttttcccaagcggcccgctgaacttgcctcgattgagtgaaacaccgtatttattaagaatgcggaacaccgaactgcggctgttgaatccactcactttccagatgtcatcaatggaatgcccgttattgtacatcgccacgatagttttttcacgttccgccctgctgatgtttttctctttggtcggctggttgatattctgtttcagatggatgatgtgggctgaagccttgcgcagcatggcacattcctccggcaaagaaccgaacatctccagtacatcggaggctttggtttccggaaacaaatccccacggctgtcaatcttgtcgtgaatggagacaatccgaaccacctttacccggcagaactcgatgaatgtcgccagctcacgggagccacgcagggcattgctgaattttgagacaaccagctcgtccccacgctccagacttgccatcagttgtttccattgagggcgcagtttctcgtgtccgttctcttcctctatcacttgtacacagccgtattgctccatccacttcttgtcagtgtcgaagccgtcataaccggctgccttgaatatgtaacctacttttgccatagtgctgttcaatgctaaatgataccaagtgcaaagatacaaagtttaattcggttaaaatcatactcaataaaatatttttcaattattatactttgtattttcacttgttacgctcttgtttatttcgcggattatactcgtaagtatgaaaaagaaaatagattaaagttttattttagagtattatcatacaaacttttatacttaactttgccgccataaaccaataaaaatatcatgtataaaggcttgtttaaagtagaatcaatgcaaaaaccgaagagaggaaacttgaaatcatactcaaagaaatgtgcttcgtatgccaaatcttttgccgtatgttttgccattgtcacattggcatcatgcggagaaaagaccggcaacagtatgtttcagaccgttaaaaatgctgccgatgcttacaggtcatacctgtccgaggtgcgaaaggaagcaaacctgccaacagaccgtctgattgaaaaagtcaacgactggcagtcgcttcgagattcggtatctgcctgtgtcgccaaagacacggcaaaccgtattcacgccaattacgaaagcgaaattcgtggattgcacgattcgttgcgcattgaatttacccgtctggctctggagaagccgagaacttttgcggatgtgttgctcctcagagagcagacttcccaataccggcaagacacggagctgatgcagtcggcagcggaagcggagccgtttttcaaaccattggattccgtcccgacatataaaggcagtgccaatgctgtcgttgaaaaataccgaatgttcctttccaagaccttgaaatccggaataagcggcaagagtgaaatgcttgctttcataaaggaagaggacaggctgttccgttcgttccttgaccatttgactgaacttgccgatgccgacctttctgtcattacgtgcgacacggagaaatgctgcctgtcgatattccagtctgcggagaatggcaggctctcttaccgggatgccttggtatatacagccaggcgaaccaaccggagaatcatactcaacgctttggcttgccgtgatgacatcaaccaagacaatgtaaagaccgaagcgcaggcaagggcttacgtttggatgttgttgcagccgtatgttgccttggatggtttcagcgtggctatcctgtccgatatggaaaggacaacacttcatgcagtcgctgaccggacacctcagatgatagccaaactcaacaagactgccggaacggacaacgaccaatggcgggtattgcccggagtactgatcaagataatgctcacatccatttgacgaaccagaaacaaataaatacaacagttatgctacaacttttttacgatgactttctctcctttgtgccgctccagcttccgcagttgctggatgtaaccacaatggaacagccgcggttctatgacgattacgtcctcctttcgtttccgcttgccgacccatacgatctggaagaagtaatggacatcttcgaggacgacatggagctgataaccctttatcatcatattccttcaagcgcaacgacattcggcagcagcacctgtgcctattccaatccggctttcggacagatgttcaagatgaacgcgagagtttctgataccggcaaggttgaccgcattgacgtgaccatctatgaatccctggagttcatgtgttctgacatctgccttgacttgaaacttcacgaaaagaccggtcatttcaagtaccgcaagaccaaggaggagttgcttgccgaatttatatgagacggacgatatacctgcaaatgctatacattatcaatatgtacaggagttggatagtcgtggatgacggatatggatacaggcaaagtgtcgtgttcagacggggcaggccggtttcctgcgtgtgccgtatgctccggctccgttccacttataagcacaatggctatgagcgtggcacgaaatggagcatatccgaatacgagctggacaaggcattggcaaggtatcgtcaaaagaatcacgagttaaaggcacggcttaaaaaaggagcgtcatatcttgaagccaaggatgtggaagccattatagagattgccacctatgggctggtcaaactggaactgaccgaactgccattattcaaacaatactgattacacaaaggattacgattatgatttggattatcatcgaaatgtcatttccggcattgctcattatactgcccatgtcattgtacaggagcaaccggctttttatggcaaagttttaccttaggatggcgggtagtgagagtgcaaggaaactctatgtgcagtgtatgcttatcttcctcctgctatatcactatgtctatgccggcagacacttcggagagtggggagttctgatatccaccataccttgtgccgttctgttctcgttcagacgtgccgacaggtggatgcacagactccacgaggataaaaaaaggttcgttatggcagccttcatcacattggtcatctgcgctgtaccacatctgcacaccacggcgttcacactcgcctttcttcttttggctgccatgttctatccctcttgccgtgtgttagccgaatggaaggatgacgacacgcgcaagcatttgaaagaaaatccaaaaacaatgtccgaacattactgctgacatcatcacgcgaacctgccacgaataagtggatagtggcaggttaatagaatccacatatagtcaaataaaaatcaaatgaaatgatgaaagacaagaatagagccgccaatcaggtattggcagatatgatgtttttcgactacctcaaagagaaagtcggtgaacggaagacaaagaccggtgcctactacgacctgttggagaaagcaacggcaggttttatcgctccctttttgaagaaccacgagtatgtgttgcaggctgaccagtgtcatgtgaccatttcagaccttgcggtggaatggcactggcacagggctaccgtcagggcgttccttgacaaactggaggagatgggatatattcgtcggacaaggttcgcaaagagtgtggtcattaccgtgacttttgcgccattctccagtggcgaaactcctgcctcttataccggtcatacaggggccggacttgccgatgatttggacaaggctttgtccgaatggataaatggcagtctgtctgacgaagatatgggagagatttgtggacagtatcatgaagccggactgaaacggcttgccgatgaatccggcaaagatcattcgggcgacaagccggcaataaaggcaggtgcagaaacggagttagcccaagagattgtcgaacgtgtagccgtagccggactgaaacgcgccatacgaaattcgcgcttcgatgatccgaccgatttcttggagttttttcacggggaactgggaggtgactggacttcacttttggaggcatccaagataatcgccaagatgattctggacgctggaaacgacggcgcgcccaatagttcgagcgaaacggatatgcttgccacgctccgacagccgttcagggcgttgtgggcaaagtaccaggagcgtgattccacccttttatagactccacaaccgatgttgtaagtcaaaaactattgtataaccacggatgaaccgtgatgccctacatttgtaggcttgccattttaagcgtgcagcggtgcttgcacgttgaccaaacagagggaagtatgggtaactcaataccccacacgactacggtcggtgggagtggttgccggacaagcagcaagctggggcaaatcggttgtccgataaaaacggatgatatggctgaaaaatcatggcaggtgatgcacatgaacgtgatgaaaggcataaccaccgcgcaaagcaacgaacaccagcgtaactggacggaaagcggctggaaacacgccatagacaagggaacttatgaccgccaaagggaacggttgaatttcgagattgtaaagggcggtaaggtgcgacctataaacaaggacaagtctattcctgaacgcatggctgaaaaccttgccgggcgtgggataaaagatcccaattcggatttggcagaaccgaaatttcgcacggtcgtggattttatactgggcggatcgaagtttcaaatgcggcagcttgcttttggagaccaggctgttgtgtatggttccggtaacaataccgccaatgcttcgcttcaacgaaagccggaaatagaagaatgggcaaaggatatgtaccgattcatgagtgaaagattcggtgaggagaatattgtcgggtgttatgtacatcttgatgaaacgaccccgcatatgcaccttaccttattgccaatccaagacggtaagtttgcgttcaaaaagatgtttgcaggaaaggacaaatatgagttttctgcaagaatgaaaatgttacacgatgaactctcgcaagtgaacgaaaaatggcaactggaacggggacgtaatgtttccgaaactggggcaagacatcgaagcacggaggaataccgccgatacctttcggaagaatgtaccaatatagaggaacaggttgtccaacacaaaaaagcattggcagaccttaaagtggaaataagtctggcagagcgcagggtgaaaggcttgacctctatggtggataacctccgaaaagcgaaagcggaaaaggaatcccaactatcggcattggaacgcacccttcaatcccatcagggagatacggctaccattatagccgagagggaacggttggaaaaagaactggcttctatccaaacgaaattggaagacaagcaggataagctacggacggctgaccaacagcttgaagcccttaaaagggacatggatgccattggcgagcgcacggaggaactgaaaggcgaagcctataaatacagtcgtgaaatccattccaacgtggatgtactgctcaaagatgtgatgctggaaacattggttggagagcattcggcaagagtggctgaaatgggagctgcggagcaatccgtctttgacggttctttgttgcagagcctgaccgagcaaggggcggaagtgatgcactgcgccacgctcctcttccttggtatggtcaacgatgccactacatttgccgaaacgcatggcggtggaggaagtaaaagcaaccttaaatggggaaaggatgatgacgaggataaccgtgcgtgggcaaggcgttgcatgatgatggcaagcagaatgatgcgaccggcttccggcaagaagcaaaagaggtaatcggcagaatatgtttttctgcaatggataacaaaacaaaataatgcgttgaatatgacaaagaaaatatttttaattctggcagtggcaggtatgggctgttcactgcacatgaaagcggctgtaccacctgtgacaaaggacactgtacagctggagtcgtacacggatatcgaacagatgctccggcctttggatccgacttaccataagggtgtattcgtgacatcgccttggaacggcaactggtttgtcagtcttcaaggtggtgcaagtgcgttcattggcaaacctgttggttgtgccgacttatttgacaggataaagcctactattttcgcatcgcttggcaagtggttcactccgcagatcggagcaagaatcggttatggaggttggcagttcaaagattgcgaactggtcacaaatgactaccatcactttcatgctgacttgatgtggaatgtgcttggatatcggtatggcaaggttgagaatcctcgttggggaatcattccatacataggatttggactgatgcacaatccgcagaacggacataatccgtttgccatttcatacggaatacagggacaataccgtatctgtaaacggctgtctgcattgttggaaattggcaatgtttccacattccaggactttgatggctatggcaaatccaatcgtttcggagataatatgctctccgtgtcagccggcttgtcgtttacgattggaaagaccggctggaaacgtgccgttgatgcgagtccttacatccggcagaacgagtggctgattggttacgcttcacagctatcggagagtaatcgcagatacaccgggcaacatgacagggcgatgagaacgatcaacgaattgaagaagattctggaaattgagggcttgcttgataaatatagcaagatgtttgatgaccgggagagtttgggcaatgtctatccgagaaacgattacagcggactgaactcgctccgagcaagattgaaaaacaggcattgggatggtaagtctccattgtccaatgacagtttgttcagtaagtctgaatttgtcaatgccatacccaataatgacggtagcgttgtaaacggcttctatgtcacaggtgccgattccctgctgtctccagatatgaataatgacagcatttccatttatagccattcggattatctctcctttataggttccggcaacgagtgcatcggttcacctgtctatttcttctttgaactcggcacggctcaactgactgataaatcccagttggtcaatctggatgaactggcgcgtgtgacaaagaaatacggattatccgtgactgttgcaggtgcggctgacgctgccaccggaactgccgatataaacaataagttgagcgcatcgagagccgattatattgccacggagttgcgcaggcgcggagtgactgttgaaaatataacaaaggtctgtcaaggaggtatttccaattatgtacccactgaagctaacagacataccaaagtcatgctatatatgaaataggaaagtgtaagattctttttgttcaaattgattagttaaatgtcaattcttttgaaaggagagcctgtccgtgatggatcggctcttctgcattataaaaatctcgttataataacttttgtatttcgctccaatagaagaacgcttctgcattcgtcttctttaatttattcaatttggttgagagtggagagtgtatcgttacgttgaccaatagatttgcttcggatggattatagtgctttatctcatttatgccattactgataagtttggcaagataagctgcctttgaagcatttgtaatagcactttccaaagtatagacttcactatgaataaagccacgcacttttttaattccatcttgaatcaggtcaaattcctcctgattgtcctgcccgcgcattactatacatttggctgtatcataaatgtcatccaaaactttttgaattgcatcaggattctcacctctgtattgaagttcaaccatcgcaaacttattgaatgtttccgctgtaacagataagtcaccaactatgtcgaaaagcgatgcaacgtcaaataactgtttacagatttccattgaacaattcttttctcctttgaaaaatgggattccggtcgtgtgaggagcaaacgcggttaatttatcaccgagcagatcttctttacttggcaattttaccattacgggatctccttctgtctttaacaaacgacttttaatgggaagttccaccacatttgcataatgaatttcctcgaataatacatccaacagaatcttgtcctgacgtcctcctgccggatatgccacctggtaaaagaatttggcatgttgttttggtatatcggtacgagagatacgttccaccaatttaacctctccaaaaccatattcttcggaatacttttccagataatcttcaatccttgttcctggaggacaaattatatcaatgtcgattgaaagtcgtttgccggtatcaagatgaagcattaaggaagatcctcccttgaataaaaagggacaaccggaccgggctaatgcttccaacaacgagaatgcacggattgttttttcaacgagggctatatcttttatcttgttgtctttggctacttgttctatccaagataatgtcctgctatcgggatgtatcatatattgattgtattgataatttgttcgactttttgttttctgttacggcgtgccgcatatctcaacagccgtggcattttgatttcatagtccgagaaggcgtttgaatatatagtatataattcattaccctgaagatgttgtagttccttgtcggatatggcatcaacaagcattttctccaatgtaggaacgggacagccatcaataatatctattggagcctctttgacaagaggacgaacaataatcatatcacgatttgtaatatatcgatccgcatcttcttggttcggattcaaaaaaacagggattgcagattccatgttttgtaatgacatgaaaacggattccattgccaccctttcaacatctaccaatgtagttcttaccgcaggtatatgtaacatcatagaagcgaatatagatggttgccatatacaataatctatgaaagggaatttttcttttatatgtctgttgagtgaaagcataaattcgcttggctcatacaaaaaatcatatttcaaatcttcatttaatttgtatttcccgtatgaaactctgatgattttgttctctgcaagcatcctattcaaaagcacaacaagagaaccttctgatatgtttttcataccagagcgcaccgcattcagcaggtcttttcgtgtgaattgcccgtcctgttttctggcaatatctattatctgatttacggcagtcattattgttcttcaattatgttgcgaagttataacaaatttggcaaatatcaatgcgtcttgccgattttgttatgcttttaataagaaaaaagcatgaactatataacaacttcgtcaaatatcgaaagaatttgccggagttgttatgcttttcctgttttacaattcctactatctatctgccaattatagcagttttacttgtcacatataatgaacacctccggctcatcttgctggctctattttcctttgcaaaggtactgcggtgagggaatgccaagtaccgctatgcaggtcgttccgctaatggcttggtggacttgacgacaactttcctcaatttccaccaagtgttaattgggtatttcatcaactcctcagccatttacttgtcttatccttctgtttccacagtctcttggttgcacgtaaaattcagattccgacaagaaagccgataaaagcttcaaaataagggagaagaaaaaatcaaaataaaaaagattatggtaaatatggaaacaaattcagatgagagaaagataatagacagagttttacatcgtgatatggtattcaggtaccaattattaggtcgtttacaagctgattgcgaatactaccttaattacggcaatcggaatatcaaacgcttgtgggcaggcaatgtaaatctgcaaattaaactgatggctgaactttataatagtttcaaggaagacgaaaaacctcaatggcttacaatggatgaaattattgcatacggaaaagcaatggcagaggaagaataaaattgatgtattaacggactgagctggtatttggcttcagtccgttatcatcgtttccttctttgatggcaatgccttttatagtccgtttaagtataacctaaatggaacctaatatccttttttatccggaagataattgtcgttacctttttaatagtgtgcctttgacttttatatttattgagaattatgaactttccccggctcatcttgtcagctctattttcctctgcaaaggtactgcggcgagggaacgccaagtaccgttccaccgatcggctccactaatgccttatggatttgacgacagctttccgcaatttccggcaggcgtaaattgggtatttcatcaactcctcagccatttacttgtcttatccctctgtttccacagtctcttggttgcacgtaaaattcagatcccgacaagaaagccgataaagacttcaaaataagggaaaagaaaaagacaaaagttcaacgattaaaacagactgattatgcacagcaagatttttcaaatcacggaaacaagagttgacagggacaactacttgaacgaggacacccttgaacaaggggacggacactattacgactattgttcggagatagacgaggaagaacgcaaattccatattgccaatctgatagaaaaggcattgccaaaagggatgttcactcttgtggcagaaaacacaatccgatacaatggcggtgcggacaagtggaaaaaggaatttgttacagccatccaagaaaaggcacaagccgttaccgttgaaaactgcatgatgtggattggagcggtgtaccagcttgaaaaatttctcaaaaatccacttgacctcggttatcagttctatatggacgagtatggcgttaatggctatgccgaacaatcgtactcgtttttacagacggtcagccagtttgagccgggaaaactactttacatcggtggagttattgactatcatttctaaacactatgaggacaagacgaatgacaaaggaacaaggacagcggtgcaatatcagccgatttcccaatttccaccacacaggcagtatcaaaggaatgaaacggatgtactacggaaaccaagcacttttggtaaggtgcggagcgtacatatacaatgtttcaagtgaaccaagtatctattatcaagcaaaataacagacattatgaaaggaacagaacatttcaagcaggcaattaaggcatatctggacgaaagagccaagaccgatgaactctttgcagtgtcgtatgccaaagagaacaagaatttggacgattgcgtgacattcatactcaaccaggcaatggcaatctgtaaagagggcggttgcggtatgaccgatgacgaggtttattcgcttggagtacattactatgatgaagatgatatagaagtgggtaaggcggtcaactgcggagtgatagtcaaccatagagtagaactatctcccgaagaacaagccgaagcgagggagaatgcactcaaagcctaccaaaacgaggaactgcgtaaaatccaacagcgaaacagcaaaccgaaaccgaccccgaaagcggtcagacaagaacccgaacaaccaacattatttgatttaggactatgagagcgaaaacgagattacagcataaggtagtaaccgccaacggacggttactgccacagacaaagaagcaggagttatgggcatttcgtcaatgtatcagccattacgcataccgcacaaaaaacggaggaacgacctgtatggattgcggttatcaatggaacgagagtaacaaaaaggtgtgccgttgcccacattgcggtgcaagactggagatactggacaccaagtgcaggacattcaaggacaaagcgtattattccacgcttgccacacaggacggtttacaggtacagcgtgtatttcttatgaacgcaaacttccgtaaaggcaagaaagcggagtattattctatggagattgcacgctattgggtggacgataacggcaagacggagataacggcattgaaacgcacactcggacattatgcggacacttttgttttggacggctgtctggagttacggagagacaactatgtgtatagacggattgccgattgcaaggtctatccatattattctgccactccaaagttaagacgcaacggattgcaaggctcattggctgacatcgaaccgacacggcttatcgaagccttgttgacagacagcagagccgaaacgatgttcaaggcaggcaggaaaaccgatttgaactacttcctgcaacattcaatgtactttgatttgtattggaacacttacaagatagttttacgcaatggctatcatatagcagatatttctctttggacagattacatccgcttacttgaaaggtgtggcaaggatattcacaatgcccactatgtctgtccattagacttgaaagctgaacacgaccgctatcaggaacgggcaaggattattcaagaacgggaggagcgtgagaaacaaaggaaaaaggcaaaggagaacgaggagcgttttaaagaattgaaaagcaaattcttcggactgtcattcacggacggactgattgtagtcagcgtgttggaaagcgtggatgattattacaaggaggggaacgccctgcatcattgtgtcggacaatgcgaatattatctcaaaccgcagtcgttggtattttcagtccgaattgaaaaccagcgtattgaaaccattgaattgagccttgaaacattcaaggtattgcagtcaagagggctttgcaataaggctacggaataccacgaccgaattattcggcttgttcagaagaacgcccggcaaatccgtaagcgaatgaccgcataatctgttctgttcttttcgtcagccacttgttacgacacacattgtagcaggtggctttatgcgtggctacggtaacttgctgtttaccgtagtgatttctgttatacaagacttaaatgctaactgttgtgcatcagcttgaagaacgaactccgaactagaaaatctaactttaacaagataggattaggttatgacggatgaaatttttcggggacaacttccagcatttccaaaaaacagtttttccattgacttggcgacaaacatacaatttgtgcattaaggtttattccgaacttttccgaaattgacctgacctgactttttctgaaaattgactttagggctgttctaacagataaatcaggtttctgtaaaagacaggaaataaacgctaaatatttgactttaagttcaaaatcaatagacgactgttttcttttaatttttaacagagctgacttgacagttggcggtggcaaaaaacttccgggacttatctcgtacaggaactccaaatcataaaaagtatgataaaacaccgtatatggattataaaccttacttgaaaccaacttttttgcaggctctgactgaaggacaatggaacctcccaaaaaaagttcgacattatcaaacatcaaaatcctgaaaatatcggaagtaatgccataaggaatatttgacactaccttaaaaggtaacagcggaactgtaaattttctaaaatcacacccaacaacctgaacgttttgggcattattaaacctcttacacaaatgcttgtataagaccaagtcgttttcaatggcaacaactttgttcacatttttcagcaggtggacagtaataaaacctttgcccgcaccaatatccaaaactgtatcttgttgagttatatttgcttgttttattgcatcttttattagcactttgtcaatagtaaagtgctgacccgtgaaacgaacgggcaatttcttttttgtcattaatcaacgtcagttcggtgaaattaagttgttgattattagtaaaatagcaatatattttgtaaatttgaaatcactacaaatcaacttcacaaaatacattgctatgatctcaagagacaaaattactgaaattttctgtatggccgatgacttttgcaaactttatgaccgattcatcaaggcaaacggtcttgcacctaagcgagacaagtccaaacgcaagtatcatcgcgactcgagaatgtcctctgcggagatcataaccataatgattttgttccacctgagcggatataaatgtttcaagcatttctatatcaatgaagttaaagaacatatgactgacatgtttccaaagacagtggcatacaatcgatttactgaacttgaaaggacagttgtaatcccgttcattctctttgtgaagagatgctgtatggggaaatgcaccgggatcagctttgtcgacagcacattgcttcgcgtatgcaggaaccaacgtattcatatgcacaaggtctttaaaggtatagctcaacgggggctgtgttcgatgggatggttctatggcttcaaacttcatctgatatgcaatgagatgggggaactgttaagctttaaagaacaagactttcgttgaacagttgtttggaaagttggccggcgacaaagggtacatatccaaggacatcttctcaaagttgtttgtcgatggtattcagcttattacaaaactgagaaataatatgaagggacagataatgacgcttagtgacaagatacttctccgtaaaagggccatcatcgagaccatcaatgacgaacttaagaacatagcccagattgaacattcgcgtcaccgatccgttaccggattcactgtcaaccttatggccgggcttgcggcatactcattcttcccaaagaagccgatgattgcagtagagagggttgaatcagaagaaaacggacttattcagctgtcactcttttagttataattcatcgaactcacgttaattacttcttacaggtgaatacttgaattcaaatcgtggagaagtgaataggcagtattacccgacagagcaactacgacaaagcaatgctatcaaaaaaaagacagcacacacaaagcatagactgattgtcttgacctaaaagattgattggaatttattcaggactgcctatcacttagatagaagtccaaggtctgctgaaatacataattcaaaaattgaaattgcttgactgcaaagatattaactttatctgataaattagtaaaaaaagaaagccgaatgcacaacaaggtgtataagcaatagcggggaaagtgccaaactcaaagtttcttccttttagctatctttgtgcctaaccgaacagtaagtgcataaaatccgctactgctcatacacttgaccgttataatgtactgcatatatatccttttgtataatgtcggcaacaaataaaaactattgccgaatttatatcctaaaacctttataggataatctcccattatagtcatcggaggattctccttagagccggccatcacgccacacggcattgttttatcgtgcaaaggtactatggaggtagaatgccaagtaccgcctgcgctaacaattcagtggacttaacgacagctttccacgaatgtgccattagtggtatttcattaactccctgtttatttacttgtcttatctcccttaccccatagtctttaacgcacataaaacatatcccggtggcgaagtttaacagcttcaagcaaagggaaaagaaaaaatgttcaacatcaaaattcattagaaatggagtacaacaatcaattatcggagaatgacaaacgatttgcggacgagttctcaaactatgtgaacggcaaaatggcttcaccccgaaaggtgggcaaggcattggcagacgaccaccgctatttggtaaacgagaaagccaaactgatgttctactttatggagcagttggcggagaactggcacaagggaagatatgaccagcgtaacgaatgggcgtgccgtctggcagcggaagccatagaccatttggcagagaacgacctctatcatttgcccgaagagtattacgaaaaccataaacaataatgaatatgcaagcacttcaaatcgccatcccaagatggaacataacagagttgaacggttatgagccgataaccaccttttggcaggatttctccattgccgacaagttcgggaacaatgccatagccgacacatacaggcgagccaagtccgaatggaaagacaactacaagtattggacggaactttgccttgtcctcaatcacaagatatggcagtggcacgagcgagacaatcaaagagccattctctatgacaaactgtggagggaagcggatgcaatgaccgctgaatggtcggacgaggaacaggaatattattttgagataacggattaaatcaaccagtggggagattggagaggtctccccacaaaaacaaagagtatgactacccaagaacagatacggaaagtaacggacattgcccaagaaaaaggctggagcataagcgttgaagacgaaaacaagacaagcatacaatttgagtttcaacgctataccaaatacgggcaggacttcaatttcaatgccgatatgcaggatgaagacatcgacacgcttattgccggtatgaagcgatattacgaggactttgacccggattatgaagcctatttatggattggcgatgacgggcacggcaagaatggcgcaccttatcacattaaggatattgtagcggatatggaagaagtcgaagaaaagatatacgagttgctacaagcacttgaagttgaatttatctaatggctacaactatgactttatcggacaaatcatattacagaagactttgcaggaacatccttgcagaccgctttaactggcgaaaatactgcacaccgagcctttattttggcagggaaatttgtgtaacaccgcttcattgttcctacggacaaatcggctacaccatcaatttcccctataccaatgcaccggaagtggagtatgattgggaaatgaacaaacttacgattgatgatgaaaattggaaattggtatgttagacgaaatcagacaaaacggcaaaacagtgttgtcaggagaggatgggttttcaatacctatgtttttcaacaacttgtgcggcaaaaaaatttcaggcgagaagtaccgggattatatcagatacatagccttcggagaaatgggtttcaagcccggagaaatcatgctttaccgcaatggtacactggtaaggactggtaaaataaatattgaaaaatagatacggatatgggaacgacaactattcatcctgcggagagctatcttcgcaacgaaaccaatccttcgtctctatatgtgaggattgcaggaaaacgcagacgcttgttcattaatcgggacaggggtgttattggcattatcgcgcccggcaaaaggacaaaagattatgcattcacagattggtcaagcatcgagcagatatactatccctcgcaagaacaggaggcgaatacggacaggaaactcattctgaaatatcagaaacttgcccggcttgccacacatacaaacgcctggcttcgtgacatcgcaaatgcggatttggataaatccctttacgagaaccatatcacgacaggaacacgcattgacggcaaatgtatcgggcttgccactatcgaaaaatattgtggaacggcatctatgcagcgtttcagagaggcaatgaagaacaaagagagtttttccacttgtcgctttgatttttgcggttatgacggaacgctttggtgtgagccacgggacaatggcgatatgtcggcaggcttcagcaaagaataccggaattgtggcaacggctattactatctgcttatcaacgatgaatacgtgataggctatgatattgactgactatatagctacaacaatccaaccgcaaagaaagagactaatttgatttggaaaagcgggtaatatagtcaccccacacctccaatttgacaatcagcggatgcggcatagtgatagtcttgccatagaaaatggcagctaccaccttgccaccgcaccgttctatctcctccttgtagtcggtcatactttgcccggtagtcagtacatcgtcaacaataataacatctttcccttttatatctcctgtgattcggtaattccgttcaagtattcgattctcataacctttggcttcatgcaaactttcacgtggctcgaacacatcaacatcatatagtcctgatgtcagattcggacaatgggtacagacataccagttcaaacgcttgaatcgctggatatatttgaactcatcgctacaaggcatgaacatgatatgaaaatggtggtcatccatttgtaaggcgttcatgcaagatttgaaaaactcaatgccgtgtatttttccctccttaaactcatagatggaatggcagaacgcctgctgatcatcgttgagaaacggtttgtaccgggatggataatattgcccatagaatactactcttgtaccgtgcaatttgaatggtttgagtggtggctgttctttgaataaatccggatgtaaacaatagaacatacgacaagcatcccgatgaccggctcttaccgccaaacggcataaacggtcacgttcatcctccttctcggtcttttgcgcagctaaaaacgccgtttctccggctttccgccgccaatatccaacgatataccataggacactgataacaccgagcaggattacaaataccagcctttcgtgcatcttgaccgtgaattatgcgcggaatagccttcgtgctgtttgcaaaaaatcatacttccaacagttcactcgtctttgcccaataatagaaggcttccggtagattgcttttcaacttgttcagtttgttggtcagcgaaggtcgaataaccaaatccttgatgtcaaccggattgtttgaatagcgttccacttctgtgactcccttttcaatcagcgtggctaaataagccgcccgtgccgcatcaataatagcattgtctatcagataccgttgtttgtacataaatgactttacacggatgattccgtcttgtatcaagttgaaatcaccttctccgaatttaccccgtgtggagatacagagtgccgtttgacggatgtcattgaagacctgtccgatatccgttcccaaagaccggtacgagagttcgactaccgcaatcttgcggaaagcctctgcggtaatctgcaatcctgaaacattttcaaacaaccgccccacgtcataaagttgcttggctatctccatcgaacaagatctgccgttcttgtaataaggtattccggtagtgttgggagcgaaagctgtcagtttatcccctaaaatatcttctgcggacggaacagtcaccattaatggttctccctccagccgtatgaacgggcaatcaatggctatttgccgggtttggaaataatgaatgtcctcgtacagtacatccagcaggatataggattgggcgtccgtgtcgttccggtaagctatctgatagaaaaacttggaatggcttttaggtatgtccgcatcgtccctttgcttgcgctctacgagttccagattgataaagccaaaatcggcaaacgatttcagatagtcctctatattggttccgggaggacagatgacatcaatgtcgattgacagacgatgggcagatttcccaaggatgagcataagtgctgtgccacccttgaagacgagaggacacccggctttaaccaacatttcaagcagggataaggcacggattactttctctatgaggttcttgtcattgtagtgcagttcggatgcaacctgttcaatccattctgtcgtaaaacactctttctttatcattgtatgtttaagttttctaaaatcgacgataattctttcttcactttacgcctgtcggcatacctgaaaagcctgttcctgttgattgtgtacaggttaaaggcgttttctatgatacggtcactctcactgccttgcaggtagaaaaagtccgtatctctcaatatatccactaacagtttttccaacgtgggcataggcacgccggatacttcttgcaagggagcttccgaaacaaggtttttcacgaaaatgacacggctgtccatatccacatatcggtatatcatatttttgtccggtcgtaggtaaacattgtggttcttgtctttcagaaaattgaaaacggtttctgccgagtccctgtccgtttccacgtagatgatgcggttggatgaaaggtgatgttgcaaaggggctatgatgtccccttgataaacacagaatttcgcaaacggaaaatccgattgcaacaaaccgtaaacctccttcacttcctctatcggttggggtgaaaagacctgtttcatcactttggcatacgttccccgcccagttctgaccagtacattttcattcacgagcttgaacagataccaggacaaagaagactttttgatgcctgtcttctcttgtagataagcaaacaaatctcctaaactaaagtcatgatgaacttcagcatagtcaagtatgaatgttgtcgtctcgttgctcatgtgattattattcctttcttcgactgcaaaggtaacaaattttcggcactaattcagaatagtgccgatattttgcgactaattaaggtgaaaaatctctcttttttgtgtaagtaggacttatcagtgggactaaaccaattcagccgcagagagggcgactctctacggctgaacagaacagatagcagactttatactcagcggtgcatcccgccactgtattccacctcctctttttgatattgctccatttcattcagcttttcattgacggattggagattggaatcgagcgaattgtcgtggtcgtatggaaaactgtgactgacggcaatcccggcattggtcgccgtgccgacatcaagggtgtcggcatccctgttatacccgatatggagaatatctccgtttggcatttcaaggacaggagtacgctgccttgtcatcgcagagaactgctcggccgccatgtctttggcaacctcttttatgtcactgcttgccagccggacaccataccgtgtgatatggtcacggatttcctgctcagagtatttcagcatcacctcgtaagttcctcccacgctgttgttatagatcacggcaaaatccttgtcttctatcagcagatcatcacccttgttctggcgaggagagacaaaggtatattgctcgttgattccattgccgtcataatactccttggcaagccggagtaatccctcataatcgcctttctcccgaagcgcatccagtcgtgaggtgtcatcggtggattgcagataggctacggaagagtagaacacctttccttcgggtacggactgtttgatctcattccgctgtccgttatcatgctgcaccttgcttttctgttccagttcctgcactattttatccacattctgcgtaacgagcgaggtagccctttttacatccagaagtgtggtcttgataaactggggcgattccttcaagtggtccagccaggatttcagataagcgcagctctcttctttcaatgccttgctcatgccgtaacgctgtgccaccaatgcgctgcctaattctgccaccagttcctcacgtgcgtattcgtccgaaccgaaaccggacggtttgatacggtcgagttgcccctcgatgcccgtactgtgggtcatctcatgccaaagagtaccataataggattcgccgtccttgaactgggatttttcgggaaccacaatctcgttcttggaaatggaaaagtatgccttgtcctggtgcatcggctttatcgggcaaatccagcggttatcacggatcatcacatccatcggttcaaaagacatcttctcgctttcatccaactttacggcatccccattcgccaacttgctccaaagttccggacgggcttcctgaagattggtttgggctacattgaatacccggaagacctgcatcttcggatatacattgtacatcttcttctcttcatcggagagtttcttaaaatcgtcatacttgatcttctccttggtctccttgtggatgcaggtaaaggtagtgagcatcacggggaaggatttttcgcccttgttcactgacaccctcggcagttccacgccctcctttgcctgcttttcggacggtttgttcatccgttgcacgcagtcaaaggtgcagaaacgcggtatcttgtagccctcgttctcgcaatgaagaagcaacatcagcgcgttcatcccattatactcacgtccggacagattcttcggccaccccaggctaccctcggtaatccacggtttcgtccagtccttgctgatggtctcgatacgctcgatcatcatttccgcaaagaggtcaagagccttgtcctccgcggacgggccgtcattgctgtttttcctgtaaccggccatggctgtcagttgttagggttatacggctgtttcacatattccgacatttccgataccttgcaggtaatgttcagcttgtcgttatagacggacagttccagttcacctttggcctcgatgccggtctgcggttgcagccactcctcacgtttacggtcaaagcctaagaagcgtacccacaggtactcgaagccgtcattgaccttttccgcagaaaatgcggagaactgcaagaaattcttgcctttcttgtctgtcttctcttcgatgttcttgcctgtctttccacggaagagcatttcgcccttgatggaatcctcgtttgaagccacggtaaggttaaccgatgaagccgacagattgaaatagaggttgtctccacgcttcttgaaagtcaacacaccggaaatttccactctcttgcctacggtatagtcagcccgattgtactcctctccatccttggcgacagagatttccactgttttgtcgataccgtttcttgctggaatcacgcaatttacggcaaatgccgtgaaagccttgttctcattgttggtgcgcactacagccgccttgctgatggttccgcacactgttacgttacacttaatcatattgcttgtagttttattttaaccaagaccatttgaccggaatatcctattaaatgtgaactacccgcatatacgttccgtctttaatcgggcgcacggattttaatccagactatccctgacgcaatgacaacctgcacacccacaatcacgagtgtcaccaccagaccgaacagccggtagcatacaagggtatgcagtcctgcaagggacagtccgacaaacaacaatcctatttccatcatcacgcttttcattatcttctgatttgctcgttctggccctgttgctctgacattccctgctcgaagttctgggatgcctgttgtgacaacacaatggcattgaccattcctgccactcgcatacgcttgctttcctccgtaagtcccggattgttcaaggtggcggacagccggctcaattcaacggtactgagttcccgtgagacttgcacgataccgttgtctgcctgcaatacggctttgttgttctctccgatgacaagggcacaacttttcatgtggggcaacaatgaagtcagttccaccttccggctacctgccatttcagaaatggcttctttctgttcctcttcgttcttgttgtcaatgactaccgccagcatcatcagcgaggaaaaggctttgaccaccatatccataatcgggtcattcgttcctgaaagtccgacaccgctgtcttccgaggataacagtttcttcatccactcttcaggactttgtgattttgtttcctggggagtggcagtaacctccgttttgtatttagccaacaggtcgttgccattatgcaaggcttgcaacttgatgtttcccttttgggcaatgtctgccagatagattgcgggatcaatgtctcgtttttgtccgtcagcggtaatctgtgccactccgaaatgcaggtgttcgccggtagtccgtgtcccggtattccctgaaacaccgagtctctgtccggcttgcaccatatcacccaccttgacatcaacagaggacaggtgcatataagtgttctgtatcttgcttccgtcagccctctcgtattcaatggttacggacttgcctccggcggttttggcattttggtttactgccaccactttgccgttattctcggtagccaacaccgcatcgcccttacagcggatgtctatacccttgtgcatttgcagcttgtcagcattcatggggtcggtacgcattccgaacggtgaagtgacaaacaggaactcttcgcgctcgaccgggaatgaataggtgtttgtcgtaaccgcttgcccggtttctgtttccaatccttttgccttcatttctgccatgaccatccggtcatactgctgtagcccgtttgcttcaatgattttttgcagactttgggcataattgccgccacttgcatacccggccttggcaagtcctttcgtccaacccttgtaatcgtcaggagacaggtcaaaacattccgcgtaccgtttgttctctacaaggaatttggaatgatgctcgtaagaatcgcccacgctgtcgtagctgcaaaacttctcgttgggcttgtcatcggtgtaaatgccgtatttgccaccttgcgcaatccaccccggagtggctttgataccaaaatggttgttctcgttcagggccatatggctttgcccgttgctgctctccagtatgccctgtgccaaggtcactgaagccgggatgccgtatttgcgcatctgttccatcgcaaactcggcgtatttctccacatattctttattcttgctcattgctttgtctgtttatcggtgcattccttttgatacctcttcctcttcttcaacttcctctttaggctggtcgtgcttgatttcctcgtcacggctgattttcgtttccacttccgactcctgtttttcggaagaggtctgttcctgtgcctggctcttgttcagcacgtccgcgaaaagcgttgccgccagatgttgtttgaaactgttcctgtcctcggcgacccacatccgttgccattgctgtggtgtgacgcttcggggctgcggtttctggttgtcaatggtgggagcgcagagtatcgccccgttctttgtcttgaacacggccactcgttgtatgcggttcaagtcaatgctttcatctgccgtgtggaacaggtccacttttagatccggcttgctctcggcaagggcatagtattttctggccaattctccacgcaccttgtctatattatccaatgactgtttcagcgtgatgaagaaacggttcaggtcatccttttcgggatagacgctgtaaccggcttttccttccggcttgatgaataaagcccagcggtttttgtcatcctgtaccatctgtatcttctcaaaccagggtttgtcagcatgcttcaccgcagggtgcgcatcgatggtggagagtgtttccaatgcccagtttttcagacgcgccacctctatctgcttttcggcgaagtaacggtcatcgggacggtagcccaacgcaccgtccggattatagaaacgcactttttcaatgccgcttttctccaatgcgctttgtatgcgctgtttgctcattcccttgatttcgttgttcacctccaaggatgcaccggcagggagtatcacatcggcactcttgccttgtttgtcgatgaccaggacaatggtcttgttttccttgtcgggatgcttcttgatttcgtcagccacgaagaaatgcttgggcatttgctcccgcatctgttctgtctggcggtagttacgataggtggcatactcgattttttcgccccgttccgctttgcgtatcacttccagcgcattgttcacatcgctctcgatggcatctatcagacaagggttctctttcagttcacggttccaataatccaccagtttgacactctcgtccgacaaccgggccggaagtcccatttccagcatcttgatacccgaagcgatttcggcaatcagccgttcctgcttgacggcatcctctgttgggggaatcccgtttttcatcaccattccctcacgggcaaggcgttgctggtgtccggtggctgctatgatttgccgaagggtctcctgcgcgtaatcgatgtaatgtgcgaaatccttttgccgtggaatatatatcgcgtctttctggctgtcataatgcgccacaccgctgccatccgtgcgaaccggtgccagatttctcgaaatagactgtacgaaggcattgaatttcggcctgagctcacgcaattccttttccccgaatccttgctcgacactgttgccgtattttgccaatgcgtcatcgtatgctttcctgtcaacgtggggcagcaaagtctggtcgatattgaacaatgtgcgtatctccctgttgtgtacgcctttgtatcggttcttctcttcgggagaaagtttttggtagtcatcccttgatatgacctcgttgggattgttcctgttcacgtacttgttccaattatagaacaggaacggtactcctttttcgtgttccttgacggattcgcctcttgcctttgcttcgctatataaggtgaagaggttgctcttacatccgttcttgtccgagtgcagagccatgaacagggcgttgaacggactgaccgccacgcctgccggataaaacttgggatagccctttcctgtggcattgagccagtggccgcccgcactgaccgccccgtttaacgctccggagagcagttccacttgtttgtcggcggcatttttctcaaactgtgatttctctttcatatctgttgctgttttattgtattcctctggtacgcacaatcgtttccctgtcgttctcttcgtaattctgcgacatcagttgctgggtatggtcgctcttgacaaggatggcattggcaagggtattaagcggcaatgccccggcattgtaagctgacaccactttttcaggcaactggatggtgcagggtacatggtctatggttgcgataaggttgttcccttgcagtatcggaccggaaatccgtggattcagcggttcgtctgcatagacccggtatcggacggaacggtttcccgtattcaaaccgttatcttcattccgtttccatcctaatgcctcgtgtcctgccttgttcaacaaattggcaccgcccagtccgatcatcatcattttgagaataggattcttaatgaatatgccggcgacgatgctggcgataggcagtacattgtctcccaaatccaatgattttgtcctgcccgtaaacatacccaccagaatatccggcaacatggcaagcacataacccaaatttttgcttatgtctcccatgccactcaatcccaaggttgagaaaaaatcgccccagccgttttcgttggcattggcggtttgctgtcctgcctgtcggttctgtcctgattcaatggctgtttcttcccttgattcttccgtcgtttccgtttcattggcttgttggacggattgtgcggtatgggtgtttcccgattgtcccggattgcttgcaagcgcggattgacctttaacctcttctttcttctccatatcctgcaaataagtttccatgtattccggagcgatgaccatcggaatatccttgtatcgctcatcttttatcttttggccggcaataaaatcaaacggcattttcgcttgggcgttatggctcatccagtccctgaaatcaaaactctgtacgggaatcttcttggtcagccgttcattggtggcgatgatataaggattgtcattggctcgaatttccttggcttctttacggaatctgtcaaagacattcctctcacttccgaatacgcccttgctgatgcaatcttcaacggatgctgtgtttcctgttttgtccttggaggaagtcagtgctgaaaatgccaggtcagccccgacaaatttggcgaagctcgcccagcttcccgcaccgccgagtgatatggcatcgatgcttgcaccgatgactttgcctgtccctttttccagtttggacggtttgtaggctgcttccccacatcgctcgatttctgcggcaagcggtgactggttcaatgtgtatgacagcccgaaaagtgtgttctgtgccgccttgcgcatgatgtattcagcggaagacttgggcatattgtctttgaccatcttgcccatcatcaactctccgatacggtattccgtatatgcgtaagcgaggtcgcaccctaattgcccggacagttcatcatatctttccctgccgatttcatccaccacggttgtgcgccactcgtttgccaacaatgcgaggtctgcctgtatctccttattgtttgcaatcttctccctgcacatttccagatagtcctccgtggtcttggagttccattccccggtcactctcagtgtctggtacggatccatcatcggattaccggctgccgccatagaaccgaggataccggctgtactggtggaatatgcagccatttcttccgtttgtttgcggttgagatagttctgcgtgtctcgcatgacaggggcaaggtgactattgaagtagtcaccgaatatcctttctatctccgcaaagcgtgctgtatgcttgatttcgcccatgttctaataattcaattggttcaacagttgttccttggtttgttctatggcgttgtggtatatctccatctgcttggggaagaactcttccagccattcatccttttctatccggtcctgaatgaaacggatggcggccatccggtcgatttctacggaatgttcgccttcctcccggttattgaaccatgctttcgtccaccatcggactccggcacggtcgggatagacggacaccattctcggaatatcgaagctctgtacgtctatctccagttccgacaacgggtcgataatgccactgctggctactgcctcggattgaagtttttttttacttcctcgctcatggtagagagatagacattgtgcctgagagcgagataattgagaaagtccgctatcaggagattctgtaccttgccggccaaaggcaaggcacggctgcctatgcccaaagggtttgccatgctcggcatcgactcaaagaagtagttcttggccgctcccacggtgaacacattacgcagggactgttctgtatattcgggtacgatgtactcgccacggaacaggtcttccatatagacgggaaggaagcggagcatcagttcctcgatttcctccttgtcacggtcgtacctggttttaatctcaccgtcaaacggagtgaactcgtgtgccgcactgtgtcccgatttgccgagtgcctggatattaccgtaaagcatggtcaggaactctatcggattcagttcctcgccgtcaaacgccacttccatgtgaagatcatttccactgatggctaccgtctgacctgcttttaccttttgtccgaaacggatgaatatattagcaagatgcgcataggtcacttcgtatttgccatagcgtatgacaatatatacaccatgctctttgtccgtaccgatacttgacacgacaccgcttgccactgccgccaaagggcggtgactggcatggaagtttatgccgtgatgaaaggatgtctctctggtgacggcatctttctgttccccgtagccttttgacaaggttacttctttattcttttcttcctcaaagggcatacaatagccgcttggggactgtagaatcatttcttccgtgtatttcatttgtagaatattattgtgttatgactgtcttatcttctcattcctccgctatgggtctgttcctcctgttcctgctgtggacgggcttgacgctgattgccggtaacggacgcttcttgctggcgttgggtgttgttgccaatcatcatcatggtcaagaagataccggctatcttgccgagccagcctgtacgtccgaacacgaggaatgccccagcaatcaatccgactatgcttaatcccgatactttgccatgcgcgaggttgctgaaaaagttgcctaacatattcccggcattcccgttggaaacaccacttaaaaaattggacgctccatcgagcgtggaagagagcgaacttgacgcttggctcacgctgtcaaaagtctgttcggctttgccggtaagtttgtttaccgtttcggtagccgctttcgccgtgccgctgatggcgttggtggtgtcttctcctatgacggcatcgctcacgatgcgcaccacgctcttgtcggtggtcagtttctcccagccgacatatccggccgcggctcctacggttgccgtcttcaatgcgcttcctgcccctcgcaaggtctgtgatgggtgcaatacggctccaccaacggctttgcctgtcgctcctgcggctttaccgcctgtctttaataatgaactccagaatcccatatctttttgtttttatattcccgttatgttaaaaagcaccggcctttccgcttcgtttccaccgtttcatggcagacctggctatctctgctttgttggctttgggttgttcccgttccgtgatttctgcccacacgtcacccatcgaggtgtatttcaccgccatggtcagccgtcgcagctttttgttcatcagttgcagcttgggacggattccgaacacgatttccatccgctgtttctccgtcatcttgttgtctgacaggcagaccgtgcgtatgtcattgacaatttccatggagttgtatatcagttcccggtatatcttgttccggttcgtggagagtgctactgccacggcattggcaggacttttcctgagttgcccggtgaactctcccatgttttccgtgagatgggttatctcgtgatagaagccgtatatctgtgcggcgtaactgatgaccgaacggaatgaatccagataatcattgaactcccgttgcaggtcggtgacggcttccacctcctctttcgtccagatgtgtccggtggtttgcaggagcatgattttctcttggttcttcaaggtcttcttggacttttcggtatagatgagaaccattccggcaagggtggggtctatctgcgcgtggactttcacgcctatgcacagcagtgtgattatgataaagattgcccgtctcattttctctttcctccatctttttatcttaccgttgccgccctgcgccacctgttcattgccattcgtgccacttcaccattgttcctgtccagcattcctgccgtcacgttgttccacacgtcagtcatcgtgtaagtcctgatgctcaggtaaagcaggttgagtttcttttggaatgcggacagttggtcgttcaatgcccatagggtctggctccgttccgctcccgtaagcatattctccttgcctccctttgccacggcatcacggagcagggagaataccgttaccagttcggttgcggtctcgatatacaggttgttcatgctcattgcggcgacaataccctgtggattgtcgctgatggctttcttcaacttgcatagcgagataaaaatcctcacaccgtcattgtacaggtgggtacaggctttcagcgaggatgcgaaaccgcttgccgttttaaggtagctgttgtatttcttctcccactggcgcatctgctcgaactctgcggcaatggtattctgcaaaagggcggttttcttctgcccgtccatctggtcttttactttgccgagaatcaattcgttgccttctgccaatgccacatattccaacggattggtcgtgacaatctgcgccttcgccgtgacagacaagatgatgccgaataggagcatcgttattttagtgattggtgatctcatagattccttttcgtcgtttgttaaactctacacgctctctgataatatccacgatattgattcgtttgggcagacctgtcaattccagcttgggcgtggtcctgtccattgacaacaccgtgacagtctttagcccgaaaatctgctgcaataagctctgctgttcgtggaagtccaccacacggtacaattcgatgtaaccgatactgcgttggaacacgccatgctcggcagtcagctgttcgctaccgatgtgatagcgtatgcgtttcaggtatataagccggtaaatcaaaatgagggaaaggagaacggcaaggagggtggcgatagatgcaagaggggcgttctccattcctccatagaccagtcccacgggacaaagcaacagcaagggcagttcgtcgatgaagaactgtgccgtttgcggtcgtagtgaaatctctctgtatatcggttgttgcatggctcttatctgtgtatatttggttgtcggtgttcttcttccttgtcagttgcacaccccgttgtaccgagtgctgcccccaatgggataatcgcgtccttgatgctgtcaaggtattcctcgcttgtcttgccaagcagggcatcgttccagtccttgtaacagggcatcaagggaaagacttttatacggtcggaattgatgtgcatggattccgctatggcttggaacttcttcacgaactcacgcccggcactgtcgttgtcgaaacacaagtagtggtttatatccggagtgacggaaagcataccgcgaatctgcatatcggtgggagtgccacccgtggagacgaacacgcttttcttggaaaggtcagggttgtcccgaaaaccattcctgtgtatctggtagaaagccattgcatcgtaggcactttcaaaccacgcaacgccgcctgccttttgcaaaggctcaccgctgaaattggctatccacaagccctcgctgctgttgctgccctcggctttgcctttgtaacttccgctaccgtccatcttgggacggccgcgttcctccagtcctgcaatcttgtccggctctttgggaagtaccagcggaaaggcaaggttggcatacgccaaaccgtctgaacggtgtctggtagccagaaagaaatggtcggcaaaagcccgttgtgtgaagatgtcgatgccacggttcttgaagtagggataaaaacgcttgtgagtctccctgtcgtttacgtcaaaacggtggatgtcgtaatcatccagcctgaacggagtgttctcctgtctgggttggatgatacgcaaaggtctgtcattgatgggctggttcaacagcctgttgcagacaaggttgaccaacctgtctggagagacgccgttccggtgttccgcaaacttctcagggaatgccttgataaaggatatgatattatagagcttttgctgtggtggctggaaacagcatttgccgttcggtgtgacgatgaacttgtcaccccggatgcgtgtgccgttgctgtccgtgcggatataggacggataacgcaagccgtcacgcttgttcaggtgatagcctgcgtccatcagtatatcctgaatgtctagccgttgcaggaagtcatcgtatgtcagttctccgtttgccatttccgtgttccttttattccttaaaatcctctgcgcatctctgccacctccttgttcatctgcgcttcaaagttccttgctgccacatccatcggcgagtccactcccggcttgaaataaggacgaggtgcggaactgaaacgctctccgtaaaattccggacagggatggtgcagcccgtgggcgacatccgacaacacaaccgcacctgcggcaagtgcggcgaatatcttcgtccccaatccgctgctcatttcgggacgggtcttcatatccacttcgttgaatatcttggaaaagagcttcatgcggtggtagtcatcgactgccaggaacttgtcgtactgtttctggctgatttcatgggtgatgggttctccgttgataatggcggtcatcttgtatttgccctctgtttctgctggttgtacggcgatggcttccacttccacttcacgtccgtgttctccttcccggtaccagcctttgttttcgttgatgtatgacaagtcccgtccgtcaatcaaggctccttcttgtggttctctgatgatatgttcgtcttcttgcagtacggtctgttcggtagagtgcggtgcaaggctgttatcggattccaatggcaggagcaagtcctgttcctgccggttccgcatagccagatcctgctccacttcgggatgcagggcaatgctgatgcgctccttgctgttcagagattccaatgtgaccttatcggaatagtcattttgaatgacattgttcagaatctccaggcgtttttcaaccggatgctcttcaatggaattggaggtcagtgcggataattcctcttctgtcaggtcatagaccatatcggcactgactttctccgactggatggtcagtgttccggcttccgtatccacgatgatgccgtgtgacgaaaggcattcttgccatttctcattggagaaatagacgggtgaggtaatcagctccttgtaaggctttgccggttcttcgcttcttggcttgtttaccatcggggtgatgactgcctgcaaatcctgcaagacatcctgctggaatggctgtacctgctcttgcggttgccgatgccctttgtagtagaatccgtaaccgcccgattgcaattcgccgggtttcatgcgcccgtccgggcgttctgccaccataggtgtacctgcatagaaaagccggccgccgactctgcgcaagtgatagccttcctgctgtctgggagtccatccgaggaaagggggcggcataccgtacctgccgaccctgccatactcaccgatgccgatacggtagccgtgaagtcccattgccacacgaccgttggcgttgcgtgcgtggacgaagttgcggggcatatcaaaatcctcctttacgatgtccgtgaaggtctcgtaggctttcttgttggcatggttcgttccccagtcggtcagggcctgcatctgctgcctgctgatggggtatcgtaacagtggggaatcgtgcccctgtactaccagctggtagctgtcacccacaggtacgacatgggcttgcataccgttgcgcatcaaaagagcacgcatttcgggttgcaagtccggtctcatcgggtttgtgttggttcgtattgccatagtccgtgtttatgcttcaccgctttccatggcggcttctaattgttcactcttgtagtggacgaattgctcggctgccgtatcgtcaatcgtgagcgagtgcgccttgcagtattccaccagttcttcctgccattcggcagaaaagtggttgacgtaatccagccagccgtattctccgcgctccatcttctcgatgagcacttcttcgggataataggtgttttgtgccataattacagtgtttgaaaggttttacttgtgaagtccagcacccatattgcgttgggcactctttttctgttcgttccagagttcttccgtgtattgctcttccggaatatagtcgagattgccgtcatcgtccatcatccagcaaccgtaacagccgaaggtgtatttgtcccattctcttttggtctgctcgttccatttcttggcgtctccctgacagaagcggatgccgtccttctcgtgcaggctgatgccgactgttacaggctcgtcttgcatcacaaaggtcagcggttcgccctgctgcatcaccttgatttcggcattgctgagtttcagttcttctgccatcacctgaaggttccgggcgatgacctgcgtggggacggacatgacctgattggtctcggtatcgatctgtacgaaggcttttgtctttcgcccgtcagccgttaccgtgtcggcaagaatgactttgccggaacggagctgcttctgttgttcctcgctgtacttctccaaggaggatttcttcagcaccgggtagaacacgacatcggcttctccgttctccttgcgcacgaaagcgaatcggctatggtcggtgaccgtgtttccgttatcatcgtttaccttgatgggaagcacaggcgagtgcctgccgtgactgagttcttccaaaatgcgcataggaaggtcttcaatcatttcctgtgtgagtccgaactgcgagagagtttcgtaaggcagttcttcaaattcaaatcgtacttgtttcatactttaatatgatattttgattatactttggcaaaggtatatactattgttcatacttcaattagtgtagttctaaatagcctaattatttgtgtttatttatgctttaagtatgattataatgcagtattcatactctgaacttatttaatgttatattttggaggtaaatcaagacatcttttggcacggtcggagaactgttcctacatttgcatctatgagtaatacacgaatcgttatagcccttcttttgttattatccgggaaccatgtgaaagcgcagttcaacacggtttcctgtccgggcaatcactataaagtcgctgtggaaaccccatcccggacgtcaaacggaacagaggcgacacccgaaagcatcacctctgaaaacgagaagtccgtacccgacaaggttgctttgtcaagtgcggactcaaaaaagaaagagcaggtagcacgctatctcagcgtatgctatccgctctcgtatgtcaagatcaattcaccatatggctatcgcaaggatccgttcaccggaaaaaggaagtttcacaacggtattgacctccatgcccggagtgccaaggtgtttgccatgatgcaggggagagtgctgaaggtaggacaggataaagtctccggaaagtatgtcacgttacaacatggcaacttcaccgtcagctattgtcacctgtcgcaggtttctgtgtcgaaagggaaaatagtcaaggcaggggaagtggtaggcataaccggcagtacaggccgcagcaccggggaacatctgcatctgaccattcgtcataaaggagattatatcaatccttgtatagtccttgattatattcagtcccaatccaataagtgggacgctgtcccatcttttggatgaatcatacgtgggtgtctatttttacgcacttacgacctttaagtcctatcattcctttagtaaccaattccattgcaaggtcttctgcatcactgccgctcactgctgagactttcaaggtctcatgctcgtcaagttcggtggtaatctctaactggtattgatgtatcacagaaatgcaatcgttttctaatgctctttctgtcatttgggatgtccagatgattttagacaccggtgccttgcggatgtttttcaacattttcacctttacaggagcatccgttccgtcttcgtttacttttctgaatcgtttgcatccacacgaacagcaccaaataggtggacggagaggtatattgtcgccacccataatggcggtcttgcgatattcaagcatgaaatccatttccgtcatatccccggtgccatacacaatatcaacgacttcactgccacaaaccggacattttgatggcttgcgtgtcacgttgataatttgtggtcttgtatcattgggcatactcatatcattcaaaatacttgtttaaaaaatcttcctgaaattcattgagctctttgaattgcgtgtgtcgattgataccgatctcttccaatgtatctaatgacaattccttgccttcgtacattgtaaaagtcggtattagtttataacaattttcatcagcctgaaatggcgtaatccaacaagaactatcttcacgaacacaacttgtatcaacgacttcaagacgatagcgtacttgataatgccccttaccgataagatataaatagcatatatccccaacttccaattttttattgcgagactttttccagtaagcacatcctaaagtttggatgctctttacgtggtcaatcatgctttctttcccttttaataaaaatactcgtattggcttcatatcctatagttgttaaaacaatgtttttatagattgcaatatacgttcaaatcaatatttgatacatccttaatatatgaagagacacaacccaacaaattaagtatgtctgggcttggatttgaacagcttaatcctggttgcacaatattgatgtgcataatcagatcttttttccagttcacctgtgagcttaattgttcgagttcttcttcagtccctttgagtattctagaacattctcttccttgatatttttttatcttccgagcaaaaagacgattaaataattggcgacttttatctctatcgttccattttaagcatttttgagcttgtccgcaaacctcataaaaatttgaaatcatattgcttatttttcctccatgtgcgtatttgagatgaaataaatgcatgtgtattgcattattttcatttttgaatcctattaaatctgcaatttctccgctaccgtcatcatcgtaaatcagatcgaatttttccgagatgtatcttgaaaaatagtattgaatagagtccgtctcataaggtactacatgttgtgattcattttcaattttagtatccgcccaatctatacctatcaatttttcttgagggaatgggataatatcggaatttacacgcactaaattattagcataaagacatgaaccatcagcaaaatatataacaggtgctgcatcgtcattattaaaataatcacaaatatcatcatagagacgagtaccatatctcatttttagtttatttccccgtatctgtttaacgcgatatattgggcggctatcctgttcggaatactcgattatataggtgaatttagaatcctcaataagtatattaaacgtaattgtgctctttatctcgtaatccgctaattcaatagtagcataccataattgatagtcaacaaggttatgagataagaatattccatgctctgggtaatctctgtataattccgggtcccaatcaattgcaataggtgcaatttggggtaattcagaaattgcttgaactcttaaagtgttattgataaaagaattaggatctattttctcattttcaactaacttcccaatcattctagcccattttgtgtattcaagtagattacctcttgtatgactccatattttcccctttacagaacaacctacactaaccctttctccacgtctatagccgttaccaaacaaattattcgccgttaattgtttttgctcagtcatggaaataccttcttgaacatctttcccatagtaagacttaaacgaaacattacccattcgagcttttcttcctccaaaattaacaatggcaaaacgtcttatatcgtggaagacacgaaatacacagtgccctgaaattttacaggtatcatcttcgccaaaaatcgcctttactatctcatccgtttcacttaaagtactatatacgtaggcgtggttatatttgggtgtacaatatctatgaatgacaagaatattccaaagtaaattctgtacacattcgacattaccccaatcaacattttcaatgctgcctccgattacaactaatgtatctccatctgtggtgctacttccgaaacgataatcataaatctcaggagatagtatattttcccaagctttgggattccacgtgtttgaagttcgatatatgactgcacttaatggaatatttatactttggaatggaatttttgataattccaaattgttaaatgactggatgaattgattaaaatctttttcttgttcagtcgttccatcatttaggagtggcaacaagctgttccaatctgcatccttagcatatagttcttctagctcttccaatattggaggatatgcaatgttcgtaataaaacttgcatttccaaggttagaatcatatgatgtacgtgtaaatcgacctatgaattgtaaggtgattggtaaactctgctttgcgtcgtgaattgctgcaatctttaattcaggcatatcaaatccttctcccaacatatttacgcagacaataattttatgttttttgtcttttatgttgtttaaaattgatttttggtttggcattgaactaaataccatcaccggatttaaatcagagtattgctgatatatctccattacttccttggctctttgttttgtactgcatctagccataagaatatggtcgtatccattctccatatcagaacggagttgcttaacagctacctcggctatatgtttatcagcttgaattaaatcatactcccttattggaataaattttataggtttgtaatatccctgcgattgtgcatcttttaaggaaaagttatatataaaatctccttttaatcttcggctatcatttctgaatggagttgcggtaaatagtgtgactttttcatcatcaaaagagtcgatgaactcgctccatgttttagcttcggagtgatgtgcttcatcaacaaatagatgacttatgttttcctttaataaatttataatctccgattcgcaatttgtaataagaggcatagtcgtgattataacatttgatttttcaattaaagtgtaccaaccattataatccataccttccttaacaataccaacattcggataagagcaatcacttgtaactattccaaatttgtgaagtacgcccaaagtaaaaaatttatttgctaattggtctcttaacgcatcagatggaacagttacaagtactttggcacattgattcgcaatgaggatacttaacatggtttctgtctttcctgtcccagttggcatgactattatatttctgccatgatgaatttgagcctttgacataaacgcatatatagctccaagttgcggagcacgaagccctaaaatggattcttgaatattttccttcttataaaggaatttacctctccaagaagctgttatttcctcaggacgtaaggtgtctattttggggtgtttaatccatctgatagataaaatatttcctctaagaaattcacttttgcgaggtatcttgtttgttaatacgacatattgataaccatcaatactatgatcattttcatctcgcgtaagaagtatttctgtattatttgcgcgtataacaaagggtgaggtggaaacaatatcaaatgtagcttcactaaattcagtagcaaatccgttaagatgctcaactcgattgtttccacaactccacaaaagttggattatttcgaaaggtaattttatcataatctaatcttgcttatatcaagtgcgttacattgattttcttgtactttttgcccatactcagtgcaaaagccatttggtctttgattatcagctctcccttttgaagcccagcaatggcagtgcgaatttcttgaagttcattgccacttacaccaaataaatccttgataaccttgtcatcaatagtttgctgcttcataatgagcggatattgagcattggcataaaagtcaaatcctttgctcttgaaactactcatattttgtgtggcaagaatgatgcttaatcccttatttcgacctacggcaatcagattacgcagaggacgattgtcaaagtcaagcatatagtgagcttcgtctataatggagaaatggcgtatctgaaccacatcgtcgtttgttgcttgcttttctaactgttcatagatgttattcagcttagagattaagaagtacacgattgccttggcaataggcccgtccttcggataaccatccatcttgatgatatagcaatcaccaatcaaatcagctttgtcctcttcctcaaatatattggctcgtaccaactgtttaagtacagacgaaatactgtcgtcttttgcagggtcggtcattttagcttgatattccttcaacatcattgtgaatgtgataggcgatccgctggttttcttatatgcttcaacaatagcctcactcagccggttattcatattggcacttgccgaaactctgtcaatggaacagagagctgatgccatttcagacgaatagagattgatttcgttgataggtcgccctgtaaagtctttgaacggagtgaatggaagcggatgctcgatggggtcaagtatgcaactgcgatccacatcaaagtgagagagccaatgattgttttggatatcgctaaattctcctttataatcgaataacagaaaatttacaggatattgcgattcggaagacaacgctctaaattgctgcatcaatacagctaacaagtttgtttttccagatccggtagctccagctatgataatttgagagttggtaatgttgcggctgttgatgtcaaggttcgcttccatttcctcgtctccatagttacccacaagtagattaagcactggaatgtcttttgtcatagccaccttgctgcccatagaatacaaatatgtatccaaattgttttcttttatcagataatcacgaccacgaagcatttccgctgctatgatacgtgaaagggtggcgttctgggtccagtcaatattcaaacttgaatatcgtaatttcaaaagagctgcatatagggttgacaagtcgtgcatggtaaagaaactggggacaatacgtgcagaacttgttgaaagctgaatgtccttaaattcttcctcttttcgctcggcaggaatactcagtcccacaatgaaacagattctcattaccttattgagggtaagactcacacgcttttctctgtccacaatacgagacagattgattttattctccatcagatctttgacaggactgatttcatccagcagaccttccatttgacgtgtatttgaaaaattgatgatactcatgtcgttactactgattaagcgtgataccaaaatagccttcatctatggttgtccgttgctcttccacattcctatgtagggtataggtctttgagataaatggctctaactttatatagtcgctgtccgttctgatttccgaagtggtacacaacagaattgtctgttctgccaactgcgggaaatactcttccataagtgcatcacggctttcattatcaagtacgcccatcaccgtgtctatcatcaccggtggattatagtcgcctaagttacgaagcactttcaaaagaacttgaatgaatatctgcttggatgcagcgttgagttgattcaatgagatttcatttccggctgtatggtatagcttaatattgaatttttccatactatcggataactcaacacgcccaacatgtcctttataggaaacaagcaacttgtttagttgctcttgcatttccgtttctatctgtgcttttttctttttcaaaagcatatctgccactttgtcgaagaatggacgaagtttcatcaatgtgtcatacttcaaatccggctcttgctgtatctgtacatcgtattgatgaatgcgtttctccaaacgttggatttcgcctttcaagttgccttccagcgatttttgcttttctatattatgtttggcttcctcataattggctatcagcatactatttccaccggaacgagtctgttccaatgtgcgcttttctgatttcaaattatctatgttcgctaattgaacctctaattcttgtctttttctgtcgatagaaacgaactggttatgaccgcctttgccgggcagttcacgaagagcagttacttccgaatcgtctaaataatcatatggatcttctgtattggtagcattctgtaaagctaccatatgtgctactacattttcttcatccaccgcatgactacatagggacagttcttttagatattctataattttggaggttacatcacgtaacgtttctatcggataggcaccggtattctgtttttgtagctgctcttttacacggagaagattgttgatttcctgcgacaggtttgatgccagtttgggcaggaacacattgatttcaatgttctctacaaacgacttcaagacctctgcataatttgcagcttcgtcagtgatgttttttattttgccgtcaatgtcttgtatgcgtttgttcaggttggctgtttgttgcgcaccttcttttgcacgttgatactcttcttctaccgaagtcatatatttgtacagcctgtcttgttcggcaagacattcattcaactcacttatcaactgttccttttgaccgcataaggcattgtattcctttgcttccttttctgcttctaaacgttgttgcgcccattcctgctggagtttttctgatgcgtgttttagttgtagatattttttgaaaccgagcacgttttcaaagttatctcgaatggtttgctgaaagacgttctttttcagtagttcgctcgattgcatggcatcaaacaagaaatattggctgagttcctggggaagattagccttgatgattttgtttatctcctgttcggcacgtagtctgtctttggcggctgtcatggtaccatacacatacatattgccattcatgttgagagagacactttcgagaggtcttccttgtggattaagcacgtaggttcttttcaagatgtatttttgctgttgtcctaatactttgcctacaaatgttatttgcagacttatctccggcttcgctgtatttatagcaccttgattgagcaattcaatgaaatgttctttgctctctattttcaacccgtacaaagccccactgatggcttcaaatagagtcgttttaccaccaccattcgatcctccgataaggatgattggcctgtcatcatccaccgtcaaatcaaggtcgagggccagataggttttatagttgcttatttttattttctgtatgagcatggcatctaaattttattgacgaattttctgaatggcgttacggataatctcttccgtatcgttgtcactcatttctatcacatctactttcttagcgtgatacgctttaagtatgtcttcactaagccaatcaaagtcaatctcttctttttcacagattgcctctatcatagccaagtcatcctttcggatgccatagtgtacaaatttggggtctattccttttgccataatcatcatgcgttttgaggatagaaacaattccagttcaatgtgtcggtagtgttctttatgggaagcggcgagaacaaccagttttcatccttccgaagaatgacaccaccgtagagcggctgttcttccgttgtgttttcttttatgtattgcaacaaggcgttatgcttgtcggacgcaaacacatcgctgcctatacttttggtatcgaacagatagatatgtccgttcttcatccggattacaaaatccacgtagaagagtgattttgcctgttcgtctccggtggtatattctatggcgtaatgctgtttgcctttatccccgttcttataccaccagtctatgtattggctgttctgttctaaataggcaacaaaatctttttccggattcgaagcctgattgagttgcacaaatggcagtagcgcatgattaccggtttcttctatgtgacttgtttcgttatcgtatgtccgttcttccggcacttcccagccgtatttcctgaatactctttttgctgccgattctttgcgggccttgtcacggatacgggcatacctttccaaagcggagtcgatgatacggtcgaatttggggcggttcgaatggtagagtaccacttttttggcttccgtctcatagattccaaagaaatcggcaagtatctctaacaggtaacttgctattttgtcagttcttcctttgctctcgaactgatggcctttagtggcaatgtatgccataaacacacggtctatctccgtggcttttctcgcgtattttacagtatcaacttccagcacctgttcttcattttggaagtgtacatcttgcggtatctcgatattgatgttctttacatcaaggcgcaaggagttagccacctttttcctgttttcattgatttgaaggtcatcgctatccggcaatgtattgctttcttcatcattatccaacttggccaactcctccaacgagaacagcaagttgccttccacaaagtcccaaaacctgcgggcttcttcgtgtaacaccttacggaagtccgggcctaaatagttacgttctacattggggcgttctgtatagcttgacggtaagtttacatttttcagattctcacggcgatgcgcggtaatggtattgttcaagatatatccggcatccgccgtaacaatctgtatcttgtcctttgcgatgtcggtaaacacatagccggagttcagtatctccttttgataatgtttctgctccggcatacgcatgatacgccccactgtctgtatggtaaactggtcgctttgcaatttgcggaagatgagcaataccgctgcgcgagggcagtcccaacccaaggcaatcgcctctttgaaaagcaatacctctgtcaggttatccggcttttcaaggtctgtcagattctctttctcgccggcaagccatactgccagccgatgattgtctgttgtgatgccacacatcacttcaagatatttctttacttggtcggcgatggctgtatcttcggctgtcatactctctttggtgtcgttaggcaactgaatcaacagcaggggattgacgttggaacctaccgctttatacgcttcggctatctggttacgcttgtccaatgccgctttgataaggttggcattgagttccagttcatcactgaaattcagctctatttccggattgagcaccacttccttttttatcatttctgcagcaatcacatcctgacgatagaccgtgaccttttcctttggattggcagttttgggagtggcagaaatacgaatctccacagtcggattgattctatcgagcacggcagccgacttgtccgctgtcttcgaccagaacatgtgttcctcatcaatgatggctacaataggtaggccgaattcctctttcgtcctgtcggttatttcgtaaagcgaaagtgaacaatcaccctcacgtaccattacattattctccttattcacgctttcccagtttacaaagagtatttcaccgggacggataccttcattctggtccagttcatcgaacattaccgggcgaagcgtgcgtgtctcctcgaatgcgcctttcaatttttcataactctgtatgtgcagtttgcgtggggcaaaccatataaatgccacttcctggtaacggctgtcaccacggtcgtgcaattcgtccatcagtcctgccagcatctggcaagccatcacggtctttccggctccggtagtcgcctcgaacactaatttattgcgctgccctccaaggtttaacaggcggatagttttatctaccaattcggttacggctttctgttgatatgctaaattcttcattgttttccgtctattcctttaattttttctgttccttttcaaaattctccaagaaatgaatttccacaggcgatagttcatacatggtccgttccttaaacttatcatattccatatcggctttctgtttggctatttctgccgatattctgccagcatgggtaagtagttctttcccggatagtttgagaaagtcgtccaacttctgaatccagtctttcatatacatgggctggtgcgacttggcttgcagttcagcaaaatcaaggtataggctgactattctattgagcgtatccaattcatcagccgaaagatagtttttcgctacctctgcatcagtacgtttaggcattgcgcctgtccacgaggtcaatcccatgaaatccttttctgcatcggcacgttcatatattacttcagcggcagtgtgtccgtgagcggaaaagtgcatcttgttctgtacggtcttgaaaaagagttgtgtggcttctgcccgtgggtcatagtctatgcttaacgcatagattgccaaaacctttcggtagaacactttttcggatgagcggatgtcgcgaatacgtgcaagcaattcgtcaaaatagttgccacctccggcacgtttcagcagttcatcgttcagggcaaatcctttcacgatatattcgcgcagtacatttgtagcccatatacgaaactggacgccacgatgtgactttacacgatagcctatgctgattatcatgtcaaggttgtaaaaggctgtttgatgcgtttgttgcttacctatgatagctccgtgttgagtggttgttgcaaaaaacgcaacaaccatatctgcctgcaactcaccctcttcaaacacgttttttatgtgccgtgagatggtggacttatttctctgaaacagttctgccatttggtcggcagtgagccacaccgtatcgcccgacagggttacttctatcttcgattgcccatctggggtttggtagagtatgatgtttcctttatcctgctgctcgttcattgctcgtcctccttttcatcaaaattaagcataccgttgaatgctttgtcgtcattgctggcagcatcgttttcttgttcaagagtgatgtcttttttctttggcaggatgcgcttgtaggcgttgtatatggcctgcggaagagcgcaaagctgcactttgtcctgtacctcttcaaattcaccttcccacgggtcttcgcttggcgagaacacatacacgcgcatcttcccctcgtaatcagtctttcggataaggtctgccaacagcggcacggcctcttccttatatataatcatcatacgcttcttgccattgtcgaaatagcggaacacattcttgtaggtcggttgttcaccgaattttgtctgttcggtatagaggtcttccttaatgcagagcatatcggtggagaggttcatcagttgacgcatattcttcatgctccggcttctgccgacaaaacttgtacgatagtagcgcagtgtgttgttctttaagccggtgacttcttcacctttaggtgtggtgtagccattgattacccgtttgtttcgttcgtaggtcacttcttcgcagatgttattctcattgttggtgacgaggatgcacttgcggtgcccgccatcttcagcattgagttgcatagtggcgtgaagggtggtaccggagccggcaaagaagtcaagaaccatagcgttaggtgatgttacaactgctgaggatagtaagaatttcacaaaggttgatggctttggaaaagcaaaaggtctaatagcaaaaatattagctatttctgctgtaccttgggctgtgttgaacaaatctgatgtgattagattcctataaggtgttgtcctatctacctgtctgttagagttatctactttttggtaacgcttacaatatactgcccattcatttttgtttttcttaaaaacgataaaatcattatctaacccccattgaacttttgttttactccataaatagttccatccttcattctgttgttgtcctccacccgggtatcgtaaagttccatctggcattttaattggaaaattaagtgcttctgaataatgtccccctactcgtcttcgatcaagtttatccaaagtataatgtcctctctctttgatatgttcatccgttagtttaaatgtatcatctgaaggtggctgtccgtcaaaatgagcttttgaacgatttgcagtatagactaaaacatattctgttgttgttacaatttcattccctgtattagagcctgctgttgactgccatataatattggttataaaattattatttccgaacacttcatcacacagcaatttcaattgcgcttgttcgttatcatcaattgagataaagataacgccacggtcagacagcagttgttttgcaatacgcaaccgcttgttcataaacgacagccatttggaatgacggtagctgtcttccttgtcaacaatacagtcgttatagacaaaatccttgtttcccgtattgtacggtggatcgatatagataacatcaatctttccctcatgcgtgtaggcaagtgaggtcagggcttccaagttatcaccctcgataaggatatggttcggtgcattggcatcatcgctgattatggctttcatggcatcctctatcaataccggcaactcatcccgcaaacgctcctccacatcctccggcttatcctcccacacaagcccatacttcttttgcttgcgcagcaggcccaacagttccgacttttcttcgtttgtcagtccatcgagctgcactatcttattgtataattccgttttgttcatatccacgtattatcatttaacgagtctgacagtctggatgctttcctccaacgaggagttcaacaactctttcacatcaacattcagcacattggcaatctgcaacagagtttccaatccgggctgtgaggtgttcgtgcaccatttagacactgttgccggatccttgcccaattgttctgccagccatttgttggttcgcttcttttcaacaagaacgactttgattcgatttatatctttcgtctcttccattttggtttattatttaccttaccatgcaaaagtaatgaatttattttattcagacatcattcaagttatatgattttccattgaaattgcgaattagttcaatattcctgcttatctatgattattagatcaggaaaaagggttatctttgctctatagttattttatgataagactggtacataaagaatggaaaattatattacacctcaaatagtcaggtatcaaaatgtgtatgatctgttagagaataacagaaccacttcgttgtttggtgtcgaagaaaatttgtcaatagacaaattgcttcaagaaaaatttgtttgtatagtgggtgaacctggtattggaaagagtcggcttgttgatgaaataaagaagcaaatttctggtcatttgtatttatgtcctgcatctaaatttaatttagaatccgctccgaccaatgaggatttctgcataatagatgccttggacgaggttgagggaaatatattccatactgttttactttcaataagacaatatagggaaaataatcccgaaacaaaggtgctatttacttgtagaaagcattatgtggcatcttataaaaagcatttctcagtttgcagtgatttaatttttattgaattatgcaggttgagtgagcatattgtaagtgatgttgttaattgtagatgttcgaatataacaaacgaaaatatcagtaaaagcgcaaagttaaaagagcttctaacagttcctagatatttgacatttttattggagtatgatgagaaaaaaggaggatgtttaaatgtcggagaactttttgagtatatgattgtccgttcaatacaaacagccatagatgtttatccgaacactacgaataatgaaagtgttaaagttcttatacaacgagtattggaaaaagtggctttcattatggaaataagcagaaaggatcaaatttcaaaagatgaattatatacggtcttagatgaagtagaaggcaatatgacacagatgcttattgctaattttgatttgttattctttgagagtcgtatattaaaagaaacaaatgggatattgcaatttgaaaatactgaactacaggaatatcttgctgctaaagaattatgtaggcaggacaatattgaaagtgtactttatgatgttgctgtgcataaagaattgaaacgtatttacataaactggtacgatgttattcctcatatttcatatgcggaagataaaatacatacatttgttaatgtgctaaaacttattgtggcatatgaatctaatcttgaaaatgagccatttgaaactttgctgaaatatatagattcttctcttctttctcttcaacagaaagaagagttattcttcatcatttttgaccactatcaacgtgtacctgtatatattaactggagaggggcaatttgcggattattacaagaatgctatacttcaagttgtaataataaaataatattggctgtagaacggcttaataagattcaaataacgaatatctgtactatattggaagtaattgccgaagatgacaaactgagcaaagaagttttcgaccattggaataatgcagcaaatattctcatgcaaacaggcgatgaggaaaaacaactggtggctttaagtttgtataatgcactaaaaaatgaagacgaacttgtcaaattatctggttcatacagtcgttttactgaaagagtgaaagaaaaatactgtgaagtgaccggctatggaaaatttacaaataataatgttgtagattgctggttggatagttgctatgcaagtgattcatatgcaataaatgcagtactatttataatggatggtcctacaattatttatgcgtataataagattacagaagctaataaacttggtgatttttttaatcataataggactttacatatccattatgagtggcatttaacgaaacaatttcatattgcgtgggatatagatttagaaagtaaaaaactcatgacaaaagttattgtgagtttcattaataatcatctgtatatgagctatacagagatcaatcctattattaaacaaatactgcttgagaaaacaacaggatccttgtttattgatagttttgatagagtatgggatttagaagatttatttcgacattttgatgcagaaattgttgatgctgaacttatatcttctttagacaaacttttacatgaaataaagataggagaatggcatatagacaatattctaactgctcttattagtaaaatcagaaatgatgaagttaagagcatttctatatccgaatacataaaacgttatgcagagacatttgaacgatgggatgaaaactcaaagaaaaaagtagaaagtcaaacaaattcacatgaatatcagcgacttattgattcttatcaaatcctttcaaaactaaatgtacacgaattctacaagtatgaagctgcatttgaagtatctaaaaatgtagaatttatacaacaacaggaatttattcaaccttttgtggatgttattgcaaaatttttcacagaactaaatttggatgaaatgacattaaagaagacatccgaaaattcttttaatctatctacatctttaattaaaataccgtattttgttaatgcaatttatcggttaggattccgtaaagtgttggaagaaaatagaactgttttgataaagactttacctgttgtctgctgtactttgaatgctggggccaacgagataaaggaaatatacaagtctattatttgtagtattagtgatgatgagaagaagcaacttgtcgaatggtggaagtcaagggaagatgattttatgaatattagtacggaggatgttttaacctgtattaccgattatggaattgatgctttgtcctataaagtggaagagtatatcgaacaatataaagccaatcaagactttagtcacagtattgctgcatctaaagctttagctcttgtatctgaagggtactgtaattggaatataaataattacagagcattgttcgattctcttgctgatgatagtattggaagcataaaaatgcagtgtaatgacataatgattgaaaaatatcaagatccagaggcaatgacatggaggattgaatatttaaaaaatcatgttgtaaagtctctttgtcgtaaaactgggtatgtatatgcggtttctaaggaagaatcagaaatgacacatccacagatgttcaaatgctttatgagcataaaaaataatgagagactgattgaacaaatgtttgatttgtttgattttggcttatcattatgtataacttcagagacacaggaatactcaagctatcttcttaatcagatatgctttttctttataaataccaataatattttttatatattagaattaagaaaaaaggtggcgtattttaatgatacaaatgcgagttttctcgtaaacaacattatggataatgctgaaataatgtatttgaaaaaagaaaaaattacaattggtaaagctattaagcaatacaataaatgcgtcaaagaatcacatttggaaatccggaacgataacgatttaagacgatattttaattatatttattctgaggttcaaaaagaaatacaagaccaaggtatatattctttagtacgacaagaggctttaagtgaagattttattcagagggagttgaaaaataccgtcatcaataaatgctgccaaatgggattagaggctgttcgtgtagatcgggaggttactctacaagataataagcgtacagatcttcttattcgatatggtttatgtaatcctattatggtagagcttaaactgcttcacaataaagaacttaaaaataaaaaagaacgtcaggagtataagaaaaagttcatacaatacactaatgcaacaggtgcttgcttgtctgtattttggatatttgatgttcataaaaaaggtggtaattgttctaattttgatgatttgaaaaatgaatacactgatttaccacataccttagtattgctaacagattgtaaatgtagtagttgtattgacactggcgtatcaaaaaatggaacgaggcctaaaatcaagaaaactcaaaatagaaaaaaataaagcattattggggttggaatatgggggcaatgcctgatgatttgcccccattagaaaagctatttcactttatatttctgaatctcttgtatcatttccttgacatcttctccaacctgtacgaagttcttgtaaaggatgcgttcccgttcatcccttgatttgaaggtgtagaacttgggaagcggtacatagccggcttcttccttttttatttctttcatgtcgaagtctgtcttgcagtaaaacttggaggtcttgaactcctcgctttcctgaatgttcatgcttccaccgcttcctgtttttgtcttcacaaaatcacgggctgtctgaccgcatatccatccggtcggcatatcggagattttggatgcaggaacaagactgtccatgttctcattgaggttgatgctggttttgtcccggtcgatggtcacgccctttttgagttgtaccaccttgccgaagatgtcggaagacagccattccaaggtctctttggaacgggcagaaccgctgaccacattgccgacagtggtgataatcttctgcatacctaccttgccataatccgcttcgagctgcggaagttcctggaatcccaacgccactgacaccttgttgcttcgagccgtaccgataaggcggtctatcttgtgaaaatacaaagtcggcagctcatcaacgatgatgcttaccgggatatttttgccttgtcccgtgttcactcgtgtaaccagacgattgaggataagggcgttcagcgcaccgatgatgctctccatttccgggtcattggcaatcaagagataagaaggacttttcgggtcagaaactttcaagtcgaagtcgtcaccgtccttgtggaatatccagtaactttccttggtggcaaggcgtgaggtatagacacgtagcgtaccaatcataccttccaactgttccattgccttgttcttcaaagcggtttgaaacggaccgagcaacggcgtcacctcgttgtcggtctccaacacctcgaaaatggtctggtaactctcattgaggaatgacaggatatgtggcatatcggaatactttccgagccaataagccggttccacttcctcgcctgcggaattgaacacccgtccggtgggtatcatccgtttggtctgtttgtcctgtaccttctctgccgtgagcatattgccgtccttgtcgtatggctctttgccccagttgcagaagaaatagatgcaggctgcaaggaagttgacagcggatgtctgaaagaactggtcactgccaccgcctccttctttcttgcctttttgtaaggactcaagcagggtttctgcggtttcagatgcggcagcaaggttgttgatgtatttcaactggatagggttcaccctcctcgaatactccacatcaacgaaattgatgatgttgaacttgcaccccttgggcagatttccgagcttctggtttttcttgtaatgatagtataatttggtagccaaggtcggaaacttataatcgtaaacgactaaggcaaagccttttgccgagtgttgccggataaacggttcgataatggagaaagtcttgccggaacccggtgtgccgaccacccatgtgcctcggaaaggattgctgatgttcacccaacctttgcggaacttccccttgtaatagtagcgcatggggatattgaccgaatacttgttctcctgcaactcccggcactgctcaaaactctcattctcaaaattgaaacggtctttcagtaatccctctttgaggaacttggaaatgttgtcaagggcaatgtgtaccagtaccacaccgattattgaggcaagcatataaagccagatgttcaaccgtaaagtgtaaagccttgtttccatcggatatccgaacaaccaaacagacaatacaaccagccccatacctattataataggataaagaacttgtttccgtgcattgaactccagtttcttcttgttccttgtccctatacaggtgatgcatataagcaggaatgtggctaacttgctatacgcgagattcccgtcattgtagattacccaccgcttgatacgcccgtgtatgtcgcagagtatgccgccccaatggtcaagcatggccgggtcaatggcatactcgaaaaactccagcagaatggagacatagatgatcgaacggaatatcttgtaaaaaccttgtaactctttgctttcttccatttcgtttccagttattcgctaattcttgtatattctgattcttaatctctcaaggtaatgattgctcgtaccttgtgcgcctgtgtcttgggtgtttcctgcatcgagccgcttcccatggaatagagccacgctttcgccttttcctgcccggccacttccgtactcgtccagtaccagcagtcatcggctgcatcgggcagttcgtcgccaccgcacatcctgatgatggggtttatctggctcttggcattatagagcatccgcatctgtgccacggatgggatataggacgactgtccgtaccgccacagggcgaagactgcttctgccataggcgaggtggtttctctggtgtcgtagattgcaaaggtgttttcgttgccgtccagtgccgtgatgtcagtagatgtgcgttggtttacccctatgctatctgcaaaagcctccggagccaagtcccacaggtaaaccgcatagccgttgccttcaatggcttcatcgtgattgacatggaacaccacggcaatgggctgtttttcggattgcttgaagtctgataccgacaacactttgccgtccgtacacaggatatgacagggcttcattgccgtgtccgggaaatcccggtgtgcgtcacaggccacgaataacatgacgatggccgacagactgaatagcctgcaagcgtttatgtataatttctttttcattttcccttagtttagaggtaattttacacctaagacaatgcccgtgcggaacaggtcttctccttttatcatcaaatcggttttcacctggcagaaaagtctccagccacctcgaagtacgtaattgtgttcatagccgaggtggatgccgcccaagaaccgttttgtgtcactcccggccgatgccccgatatggacattgccgtaatggttgcgaccacgcgccacacaaggcttgtaggctactccgaatccgtaactcctgtaattcctccagaatgattccggacagatatgaccgcaggatgcgcattcgtcccatttgagataaccattggcaaaaaactcccatgtgtggtggtacttgccctcatgttcgtatgagagggtgatgtccagcccgttttgatacaggcaaccgacacccaacgaaagacggtcgctgttgctttgcgctttaccgttcatggcaaatgtcattaccgtgaccaataccaataatatctttttcatcattcctcctccaataatacacggttaaacgaatcggctgaaagcacatcctcgtagtctatattcagatgtatgttcctgccgcttatctgtttctcggtcatttcaatggtcagtaccttgtcgttggggaaggtcatcttcttcaacacgatgacattgcggtagccatgacggaatgactttgcctgttcaagtaccaatgcgggagccagctctatgatttgggcgttggtcgccttggacaacttcttgtccgcgagttttacccggatctcgtcaatgtcaaaacggatgtttgtcttgttctcaatggagaagtcaatgaaaaaataatcaccgaccgcgtagatgttgttcaatctcatcgtcatgcggtgttcccggcttctcacgttgcggtatttggcaggagagttccatatacgcctcgcaaactgtgtcatatccgcctgtgacatactcacggcaggattgttataggcgttacgttcccggaactcgatttccttgtccgtcacggcttcctgcatccttgtggtatagagcaacgcatactgggtacgatagcgttccgtgacaatggtgacgatggccagtatctcaccgtcctcgtatcccgtctcctttggtttcagacggatcgtgttgtttatcggttggtcaccgactactttgtccgtggaaatatccacgaagcgtataggttcggaagcggtaatgaccgtggtcacttgctcgttgacggtcagttgctccagttcctcgtaagtctgctgggcgaatgtaggcaggctcgacaatgccgccgttactccgatacagatagtcttgataatcttcatatctatgattctttgaatggttatttactttgcatttcttttttccttgctgttgatgatatagacaaacgtaccgtatttcaggttgaccttgttctttttgatgttcttgctgatggcgttgctcgtcttctggtaggcatcctgaatagcctgcattccccattgggtaaggctgttgccattactgccggtattcatgttcatgttgctgttgaacgctccgcttgccacatctttggcggtttccctgaatgaacttgacggcacatacagtccctccagtccgtcggtatcatagagcgaaaggctgaccttgatgatttcatcattcaccagtacgctgttaatggttcccttgacccgctgcgaggaaaaaccgctcatgatggcatagagataagaaccgcttttgaccaccgtctcattgatttccacatcatccaaaagccgaagcctgacacggcttccgttcacggccttgacatcctcgtctataatcgccttgatcagattaggctcatgctcgttttgggcaatggtgttgaaatagtcggaggtcacttttactttcttgatcatttcacccggttcttcgttttcggaaggagcgtttaccgcccggctgtcttcattgattgttccgcttgcggacactccggtttccgtgcgttgttcgagactgtcttctgcaagcggttcaacaggttccacctgtgcctgcgcctttagtcgtgcttccgcgagggcacgctccagttctttgagggcttcctgctctctcgctttggcatcggcagcgtcctctgcctgtaatttctgctgttccagttcacccaagaaggcaacttcgtcctggctgtactgtgattcgtatttttccttgtcatcatcgggttcgtctcgttctatgttatccacagccgtgtagtcggcaatcttgccccacgactttgccatgttctcgtatttgcttcctatgccgtcgccgcccttgatggtggcatcgggcaggtcgggattcaggaactccgtggtctggagtgtcttgtcggctatctctgccttttctgcattgaagaggtcaaagatgaaataggacgcgcccaacagcggaatatacaatatggcaggaagcatatatttgggctgcctgaaattgattttctcgaatatccttttcattgttgtctggtttgggtgggttcaacaatgggagcaaccggctccttgtggcgttctctgagcaggctgtcctgcatttctgtagcacttcttatctcctgaccatgccgataagctttggtcagccgataaatgttgaaggtgaatgtgccgattacgaaaccgaataccatgacaaggaacagtatcttgttcctgttggcaaagccctgtatcttggcggccagtttgtcaagacgtgtcgcctgggcgaatttgcgaccggcattcacatcacgctcgtatctctctttgtattgtggatcgttcttgtccggcatcttttcgccgaacagcatcctgcggaatcctttggtgttcatatctgtaaattttaataggttgctttcgttttctgttcgatgtctttattgaggagggtacgccaatttacgataagcagtccgtgcggattgttctcggttctcggtactcgtttaagttgccctgccgtcaccagttcacgcatcaggatattgcttctgcgctcgatacgctgccgtccgtaataagtgaactccatattgcttttgtcaaaccgcacactgtcgcagtaaatggagaatacggcactcgttcccaagatgttggagtaaaagcctttctctttgagcgtgttgtactgtgcaagtccggtctcgtccaccaggtacatcgccttttccatcgtgtatttgatgtacttgtcatcgggaggaagcgtgaaaaagaagtggtggaacatttccacatgacttttggcttccacatcaagggtttcgtccatcgtggtacggttgaccaatattggcacgttgccgtccagcacatagactttcttctgtgcatctgtcaccattgtccgtgccgtccaaatgctgcttacgctgatgatgatgcagccgacaaggaagaacgagcagatgattcccactaacttgattttgttttctaaatttctgattaccattgtatattcttgattatgagtttacgattatcgcatcatggtgccgattgcaccggtcgctgtcattttcgcctgttgagccacaccttcaccgaagtttcgggttgagaatgccgtgtcgccttctggaatcatccatgccgccaagtccggaacaaggttcaggcatttcaatgccacgatacttgcagccataaggtagcctgccgagaaaaaggagttttgcagataagcagccattgtctgctcacttaccgtgattgccgtcaggttttccacctgtatgcaaagcacaatgtcgaacagaagcaggacataaaatccgacgaagtagagcatcgcaccataaaaatgtaccgtcagataccttgtcagccatttggcccaagctccttcccatttgggcaagaggctgaaagcccattgtatcggtccgaaaatcgtgagcattccgagcaggatttgctggcagtaaatcgtagcccaccagcctatgcgaaatacaattaaagctatgagcatcacgattttatctattcctacaacaatcccggaagtaagtgaagtgaaccaaagtttggctgcatccttttccatattggtcacttcgtccaccccggtctgttccatagtggcttctatcagattagggtcggaagttccgctgtgtgccacatccgcctgtgcttgcaggctggtgtacatcgtatctcttgcatagatgagttgctgcacctcctgaaatttatcctctatctgtgtggcttctgcctggtacaggtcatgagtgtaagagccgatacagtttgggatataggataggaaatccaacacacaccagttgcttccgctgtttaccatacccgtgtcagccggaggataccaccagcataggataattgaaattgccaatggcttgaacaacttcatgatatccagcggttcattcttgaccatcatcttgtacgccatacctgctgccatgacgattgcaaacaaggccgcgagtgccatacacatctggagaatccaccaaaacgggccttgtgaacctgtgaaggtggcatccgtcaggaactcgttggtctgaaaaatcacatcatcaatctcttcttcaagcagattgatgccgaaatctgaaagtatatctccgcttgccatctatttttccatttaattttatctgttcacactctcattaccgtctccgtcttcgcttccgtcatcattctgcgaccctcgcactgctgaccgggattcgttccagcgactcatggcattgctgataatgcttcttttgtctatctggcggttctccgttgccgaaaggagattcttcgtggcattgcggttgctcaactggacgagatatttcaccagtacatcgttttgccgggagacatcggcatagatttgcagatactctttcttacgctgcgcattgggcatataggcatcccttgttgccttgattgcgcattgatagacacggtaatagtcgttccaccgttctttttcttttggcgagccgcctgtcatcattatgcggtcaatgttcttctgaaactgccgcatctgggattctatcttgtccttttccgcaagccaggccagatccacttgtcggtctgccacattcaaggcttcaatcttggctctgcttgtgagtgcggaatctatggcttccgcttcatctacctgctgataggaagccacgcctgccgccgtgcggaatgtgagtttgttcttgaccgctgccgttttcttgtatttgttgtgcagcaacgtgtaataaagttccggtttgagcgcaccggctccggtttcttccaccgtgatttggttcatcttgggcgaatcgtggttgtaggtgacatattgggcgtttgccgcaatggttgccacgaacagcatcgttgtaaaaatccatttcataatttctctatttttagttatcaataatcctgtttacctgattgtctccaccgtccgaaagcatcgtcaataagttcccgtttggttttggtacgatagactttctctttccaatagccgatacgaacctgtatgtaccgccaggtctcgaaataggcacggttcaaatgcttctcgatattgtcaagagaacagttgatgctgttcagcaccatcagcaagtccgaagtggaacaggccgccgcacctgtggcgtacagaaccaaatcgctcacggatttatataggtattctccttcctgggctatcatccgtatggctccggcattgatggataatatcagcgtgtccgccaactctatgtgctttcgcttgatgaccttctcactgaaatcttcaagcatcgccttgtagtcggatattctttcgctgacccctttgtaggtggaatgtacattcaatgccgtgcgcagggactggtacatcacgtcaattacatcgaaagctctggtgtacttgtccagatccacgttcagttccttataacccaccatttccttgcggctgtactcatgcaacagtttattgctgtgttccaaggtggagcgagccagcaagaggcttcgctgttgcttgtggtcattgatataggcttcaaccgtccccacatcaaaactccattgcgcatttgcggacaggggtgccagcagcattatcaacagtccgagtatatatgtcctgcctcttttcatcgcttgccctccttagtctttctgtttcgtgcgttttccatccaacggtcgtgacattcctccacaagggaaagtctgcgcccctgatcatcgtcaacgggtggcagaacatctttcagcacgtcaatgatactgcgcctgtagtgcatcatcttttccaatgataccaagtcggcgtaaatcttcgtgagccgggaatccacttcacgggctatctccagccggtcgcttgaccaaagcaggtgatacatatcgtttgttttcgtgtcctcctgcggtgcagtacgggcgtattcagtcgttatcttgcacttcggatattctttcgcgatttccgctatgcggtcattgaccagttttgtcttttccttgtcgctcatatcggggtcaagcgtaatcacttccaccacatgggtatccgaatactccgttgccaagtcccaggagatttgcaggatagccctgtgtatcttgatgccaaggaagtatttgggctttcgggcgattttcagtgtcgccttgaatgtgatgatgccgttgatattcgggattgtgccttttcggacataggtgtagccgttccaggaaccgttgtcctgccaggtgatattgtaagccgtcttgcagtcttgcatgatagccggtatccggtaatagtcatcggtctgcacatcgttgtcgcttttggcttcttcttttgcctgtgcgatttcctcttgcttctgctgccaggcggcaagttcaggtttcaacctgtctatctccgctttgttctcattgtatttctgacggagaggaacggcatcctccacactggcattggcaatctgtttgataagcgattcgttttccgtttccaatgcggatatttgtgactggagcgcgtaaaccttgttgtccgcttcccgctgcatggcatcgagttcagacaaatccagttcctcgctttcagctgtagtcttcatcgcgcactctttggaatgtgcgttgagcgtacttccgcatttccggcacttgtactgggttgttccctgcccaagtgtcgcaccgtccgaacaggtgacactgattgttaccgtttcgcatcctttcagtttctcttcattggttgcctggtaatagttccggctgtcggaagcgatataatagacatagccgtcttcgttgtcgttaaactcagacagatgtgcattaagttgtgccttgaatgtgttcaaatccatcgaataggaatcgaacacgtcttcatagactatttcctcgttgttccagcttttcgtgacatggatttcgtaggcgtatgccttcttggtctgcttctttccttttttaatgatatagctggactggtaataattgatggtgtaactgaagccgtcattggcgttgttaagctgttgcactctgttccttgaccatccggcgtagcgttccgaattggaaagggcctgttccttttgcgatgcgttgggatagaagttcggatagcttgtcttgaagcgggtccattcaccaccttcaaggatgctcttgtcatctgtcgggggataatagtcgcagagggagacactgccacggtcacgcctcgcgatgtaccatcgctgggtgtagtaattcccggctgtttcgtccaaataatcggtaatccacgaagtgaggttgtagtcgctgaacttgaacaatcctgccacattttcttcactacccacgatacccagtatggtctgtccggcattgttctccagttgctcgaaaagtccgttgtaatgctcgtagatgtcaatgaccttgctgaccttcccgttcatcagctcgtgaaacgagttctgttgcaacaaggcgttcccgatattggtgattcccgaagtggcaagaccggctcccatccggtaaagtttgtccaaatcggctttcaggttttccttggtgaagttgcccggtattttggatatgtcatcaaagagccgttgccagtccacgttgccaatctcggaaagttttaagatggaggcgatttcctcattgatttccagaaaggcgatatcggagaaagacagtgtgctgttggtgacaacgctctcgaactgcatacagagggatttggtgtcatcgcacactttcatcagataactgcaccaatggagtgcggtttgtggagaacggagcatcagcttggcgacaatccatgtcttcgggataatcttgtgcgccaccaagtgataaatcctgcggtagtagtaattttcggtggcactgctccagatgcccaaatcagtgagtgccttcctctccaggaacttgctggcaaatattccggcagtggccacttccgaagccttgtagtgtttcagtatattctgcacctgctcgtcataatacgcttctgcaacggttccagtaccgtaggcggcaaccatagcggcaacggttttcgcatcgaagttcacgctgtaatactgggcatgaacttgttgggcgaaaatcgtggctattgtcattattatgagagcgaatcgtttcattgttgttttgtctttggttgatgaagattcaataccttcccggcagcattcactttttgggcaaacggcagggacttgcttattccggaagcatcccagtcagcgcaataacgctcgatggcttccttgtggctgcattgcagttcagccttgtagagtttcaaggcttctttctcggcccgttccgtggtataggtcatgtaacactcatgcggttcctccacaccatacacaccgctggtagtgccacggcggataaagacctcacgaaagaacgaacgcccctctttattctccagccggttgatggtaaagattttcttgcagtccacgtctgtcagaccgagaatagccttgatggtatcaaagcgttcacggaacttgctttggtcaagcagcattaccacatcggagttgttgatgatagcctcctttacaatctcagacccgatgatgtcctgaatctcttgtgtgaccacgcccactgaagcccagaactttcgggcggtcttatacatgaatttgatgtattctgccataagagggctggctatggctttccatgcctcctcaatgaccaggactttgcggttcttcttgatacgcatcttttgcaggaacacgtccatgatgatgagtgtcaccaaggggaacaggagcgggtcatcttttatggaatcgatttcaaagacaatgaaggtctcatcaaacagcgaactgtccatgttttcgttcagcgtcttgtcgtggttgccacctcgatagaaatctttcatcatataccggtaggtggaaatgtctatcccggttatactgttttcattgcagatgtcgggaatgcgttgtacggagaactcatagaatgtgttgaatgacagtgattccactttcagttcctttctcctgcgttctatctcgtctatgacagtttctatccgtgcgttcagttccgtttcactttcagcgcgattgccgcttttgtttcgttcgtcaatcaaaaggcttttgcgcaaatcctcccgttggggtggggtgaaaccatcgaaaccgttgaagtaggtatcgtaatattcggtgatgacctgctcgatcagcctgtcttccgttttggtgaccgtcccttggctgcctttccaaatcagcagcacgagatttttcaggaagcctgtcttttccacgttcaattcctgcctgttgatgcggaaagggttcatcgtaatcgggcattcctccgtgtaagatatatattttccacccaaatactcgcacaatccctcgtatgagttaccggtatctaccattaccacgtccgtcccttgctcgtgaagctggcgcacaacgctgttcatgtggaaggatttgccgctgccacttggacccagacagaaaaaattactgttgtcggtcaatttctccgcgccctcttttcctgtgatgtcgatagccacaggcacgccttgcctgtccgtgtaatatatcttcaaaggagttttctcgctatgcaggatgcgttccttgtacatcagacaggctgccgcatcacccaaggtaaggaaacggtcatagtcgggattcataccgtaacagttgcccggaaaggagttgacgaacagctccaactggttgtaggctcttttggaaatatggatgcccatccttgaaaactggttttccagatggttggtgcatttgtggaggtcggtgtccgcggacatggctactacaagattgtagtgcgtatagaccagttgcttgctttcccttgccaccacctcctgcacacgcttgatgtcttctaccgccatttgattaccgggattgggcatactcgcatggcggttcttctttttgtcaagcaaggccagttctctcttttggttgggaatgaatatcatctggttatacaccaccgcttcggtattgggaatgccggacacaaccgacaccagatccatcggcatactgctgttgttgacttccacgttggtgtagggatggatgacagacggcaggctcacgttatccacatccacaaggctatacaccttgcaccgtttgtctcccatggagatacattcatcattcaccttgaagttagtcatcgagactaccttgtcacggaagttcatggcgaaatagcggtcaacatattcattgacttcctgcctgttcaggaatctcacctgtacgccggcatcacgcagttggtcgtgaaccttgcgtatctttacaaggaagtctcgccacttcttgccgtcaaaagaaaacagacggcttttcttgacttcctgagtgatagtcaggtaacattcgctgtcggtataaggtcttccgttgaagtaacggaaataggatgtggagagaaattcacggttctcgtcactctcttccgtgaaattcttccggataaaaatatcctgcttgtgtatggcatagccttctcccaaagtctgggcaatggcggtgaaaagttgcgtgaactcatagtaagagtcgatattggcgcaatacttctgtaccgggttctccagtttcagcacggcggaatactctccggtcttggtatatatcacaccaatcccgtccgcttcttccacggagaaatagatgtcctgaaagatgcgtttccgcttgccgccagttccaaaggcatagaccgacacggccatgcccacgcaaagggcaatgaagactatgaaaacatatataatcattcggctgtttacaattaagggcaggctgacctattgaaaggtcaagcccacccacgttcaacattcaatatatccattcatggtcaaatggttttctgttacattttctttgagtaggcatagatgaacaccccacgttccagccgtttgctgtgcaatcccttgcgctgcttgaacagaatcagtcccacaccgcttgtcacggtgacggacaggacaatcagggcaaggacgaatcctgccatacagtaggctatgatgaagccgacaatggcgatgcctatcgtggctgccgcccaatagatgtagcgaccctgaatacccataaattcaaggggacgttgcagccccttgaacaatggataatccggatagtgttcctctttcccgttcatgatacctgcggtttaggagagtccgaagaacagaggaagtgcctgggctgccgcgataaggaagatgcaggctccgaccaccatcatgattttcttcttgacatcctgctcctcgttgttcatcgcgatatataccgagatcgcacccactacggctaccacaccggcaatggcgtaacagagtttcaccacgataggaacatacttggcgatttcctcgctcacttgggtcagtgccgctgttccggccgagtagtctcctgcggtagtctgtgccatcaaagcggtcacaccgcacattaccatcaggcaggtcatctgcgttttctttgaagtcgcgattttctttgcgaatcgttttactttttcaaacatacttgtcttgttttaattgaactttattgattgttttacactcgtgattttctaaattcgatagccgaaaaatgccgggaagactattgttgcacctatgatgaaaaggcaggccccgaccagcgtgagtatgtgcttggttattccgtcctcgcccgtgttcatcttgatgtatatctggaatgcggctatgaccgcaaaacctcctgcaaccgcgtaaatgatatactggacatagagcatcatcgtcaccacatagtcgtgcatggaagccagtgcgtccgctccccacgagtagttcacgccgccgcttttagcgaagacggaacaagggagcagcgtacacagtgcgcttagtattcttttgccattgtgtcgggtcatagttcatcaattacgttcttggtggttacacctccgtccggatgcaattctccaatgccattttgaatcatcagcttgtacagctctgcggagttataaggattggagaaggtaacctgtgtctcttccatgttagccttgaccttgttgttcagagcctcgatgacatcctgtctcggcttttcgtctgtgggatttgtttcctccgacacattctgtgtctcatcgatgtagtgtgtctcatactcgttatctccgatattgaatcccttgtcgttctccaccacgctgacgctttcttcctcgtcaaaatcgctcacgtcaaattcttcttctccggattttatcttttcttcgtttttaccataaaggtctcttgctatcatcacagcgtagtagatgatgtatgccacggtcagcgcaatggcgaagatgaaatatgctttcatatcttatagtctgattttagaatatgattaaaatatgaacgcaaaggaaatacaataatttcatactacgaaatatccttgcgaaaagcggctgaatattaaacattattctgagaaaatctaaaatcatactcaattatcatactttaagcgcaattttgaaccgaaaaacgagccggattgagacgaggatgaaagatgaacaggttgtccggtttgcccggcttaatgtctttacttgtattttccaaagaagatcagatgaaagtctcttattcatcaatgactattaaaccaatcacccgtttctttgctcaactcgtgcaaaatcattaactttgcaacagattttcaaggtgtttgtggtaataaaagacgaaaacgcaaaactgccatgtatattttgaaagacgaacagagaacaattaccattaagcggatgaataattatggcacttgctatcaacatagacgacctgctgaacaaacagaggatagaatccaatcggattgaatttaagaaaggttggaatccggtgagcatataccacagcgtatgcgctttcgcaaatgattttgacgaccttggtggcggttatatcgtggtaggcgttgacactgacgacaagaccggagttgccattcggcctgttgaaggaatacccattgaagagattgatgacatccttcaggatatggtcggctataataacaagatagccccgtactatatgcctcggacaagcacggaggaagtggacggcaagactgtactcgtaatatggtgccctgccgggattaaccgtccgtattctgttccggagaatgtaacggcaaagaacggttccaaggaatacttctatatccgcagtggaacaagcagcattatcgccaaaggtgaggtgctggatgagcttcgcgaacttgccagtcgtgtgccatttgatgaaaggggcaaccctgacattcgtttggaagacatatccactttgcttttgcgtgaatacctggtgaaagtcggaagcaaactggcaagcgagattaacatcagaccactgcaagagattctggagcagatggacttgtttgtcggtccgaaggaaaaacgtatgctgagaaatgtggctgccatgatgttctgtgagaatccaagcaaatttttcaagcggacacaggtggagattgtctatttccctgaaggaaggctgaataatccgagtaacctttacgaaggagcagtcatcacaggttctgttccgcagattatagaccgcaccttggaatacttgaagcgtatgctcgtgatgcagagtatcatcaaaccggagaatgactatcgcagtaggaaattctatacttatccttatcaggcattagaagaaagtgtcacgaactcgctttatcatcgtgactatcgggaatgggaacctgtcgtaataacagtagagccggatagtattaccattcaaaatgtgggtggcccggatcgaagtatatctgccgctgacatttcccgttgtgagattcttgtatcaaaacgttaccgcaaccgtcgcttgggtgaatatcttaaagaactggacatgaccgaagggcgttctacaggtattccgaccatacaaaatgtgttggagaataatggctctccacgtgcaaccgttgtcacggatgaagaccgcacattcttccgcatcacgattccttgccacgaagctgccggaaatataatagccgacatagccaacaaagatgcttccgtgaaggcatcaaggcgaggtgcactcaaaactgcactacaaactgcactacaaactgcactacaaactgcaccaaaaactgcactacaaattttggaacaaatacaaatcaatcccaaagtaaccatgacagaccttgctaatctgacaggttattcaagaaggtgggtcgcccaaacaatgaagcagcttcaggaattgaatgttattaagagggtaggttctactaagaccggctattgggagattatagccaaatagataataggaaaaatccataaccaggtttacttacacacatatccacgaaaatccctcctgtgcggagagcctttcgtggatactatatttctatcaaagggaatacaaagactaacgccttttgcctctcagatagtcattgaggtctttgtaattataataacattccgaatggtcagttacacggttgccacaaagtccggcaatagtttcgactgtttttcgcccggcaaggtcgttatccagatagcaatggatggcggtgtaccgttccagttccacaagacactttttcagattactgactgagttcatcacaagaaaatcggtaggactgtcgatgcagacatgatagtctccttttctatgaagttcttggtaagacaagaagtccataaagccctcgaacacgcagacatggttttggattatatccttgttatacctgatgacggatatgtctttcccctttatacatcctttataataaggattgcgcacctcgtaaccgccggtcttgttttcaaaggctatggcgaaatagtgtcttttgcgtagctcataatgaatttccttgcaatatagcctgccgatattctcgctgatatacctggaacggaggtaagacaacagggcatggtggctcagttctcttacttccacgttttccatttcttcctcgataggacaggggcggacactccggctttgtaactgttgaaaaggtacgccaatggcattctcgctgatacggagcaataccacacttacattgccagtacgataaaggtgttttcccagttctatgatgtcacctccggcagaaagcccaaagtcgtaccattcgttcaaattatcgttgaccttgaacgagggggtacgttcctctcgcaatggggagaggtaccaatactggcagccacgcgcattgaccggagaatgtcctattatccgcagatattccacaagccgtatctgttttgcttcgttgatattcattttagtatggtttacttatatatacccacaaactaaaccataccggttagaggtggaatgaagggttataggagtaggtacgaccgttttttgtaatggcatgattttccaacaggaacttacacaagtttaccaatgtgtttcttcctcttgaatacccaatgctctcatatccctttttaagagcttcaagcaaagattgatagccatattccgcgcattcttcaaaggttacttccaaggcggttcggtgttgctgctcggtcatatctatataagaagccagtctgtccattttgttctttttgaattgatgttcttttaccaggtgtgggagagagtcttctccgatttcaaatgcgaaaggcgtaaattccctgtcccttatgtgcatggctcttacttcgctgatttttccattttcattgttttttgatatttgcaggatagtctcggccttattgttcagttctgttccgatatgccctctggtattgtcatcccctttgtttagatgtaagacggtgtggatatgcagttcgtaatagcttgaccatctcatcagttcattgattatgtcaagagattcactgggactgtttatgtcatggattaaatcacggatgccgtcaatgattacgagcccgatgttttgctcttcgtggagtgcccatcgtataatatctctcctttggtcgggagtgtattctcgcagaaccaagaattggatgttgtcattttcctggtcagtaggcaatcctgccagtttgaggattcgatgaagcactttgtggcaatggcacttgctttgttctgtgtcgatgtataggattcgattcttgcaagatggcagttctgctttgtactttagaatctcctttccggaaagagccgatgcgacaatagcactgacattgaatgtctttttgcttttgggtttgccggtggaagcactgaaatttccgattgtggcaatggtaacaccgtctatttgtacgatttcctgtggaaactcatatttttcggtaacactcagccgtatatatttcaataaagacttatatttggcttcgtctatccgataattgttgggttgtatcatatcaggttgcattattttttccctccttttgttggtttgttcttacttttttgtcccaatgtgtaagcgatgatattggcttgcctttctatttctgtattggagaaacaggggttgcgctttatccatcggttcaggtcatccctgagaatgaatatgttttttccattcggcttatacacggtaagttctttctgcatggttaacttatagacatagcctttggacacttgtagataggcggctacctcgtctatattgagaaactcttttgcggcataagctatcttttccacattttcaagatgggatagcagttcggccaaagaaccgaatcgtttcaggtaattttcaacattcaggatttcctgctgaaaattttccaaggagttgttttcgaggaatgatttcaatccttcgatacgggagagtagtaagtctatttcttttctattcataattcttctcttgttatagcagcaggttgccctattgtttgtacttgatttctcattgcccattcgcaaagttcctttctgttgaaatacaccaatttgccgtttggcttgtagtgtggtatttgcttgagagaagtgagtttgtagatataactctcggacaaaccgagataagcagaagcttcagcggtagtcagcacttccttgactgcccaaatacgctctttcaactgtgcaatgtaattctcgatggtctggattttatccacttcgttgatcttttgttctaacgattggagccgttcaaaaggtttctccgttgccatcatcgaaatcatgttctccattttggagagcatcttattttcatttgtcgttcttcgatgtctcattgattgatgctgttaaatttgacaatgggaggtatgccctccgtgagtaatcgattacggagggcaaaggtagatgagtatattcgcttgattatgttgagattgttgagtatcaacacaattctcaatacaactctcaacaatttgttattcctttgttatacttctctgtttttgattagagtgatatacttgtctatgattgccaaaaactgcttatctatggcgttgggagtggtgtcttttatccgattgagggttgatgacatatcgtgttgggtcagtaatttcttccttgaagaactgatgacaagatgtttttgggcaattaccgattgccagttataggttatcacatcgtgtgaagccagtttgtccaacaataaaaccaatttgctgttgtttcttgaagtcacagtctgcaatgtgtctgccgcataacaaatggcaacattgtctgcatccaaaacttccttaaacaaacagacctcattggcaagctgcacaatgaggtccagagtatgtctgtcaagtaaaggtttgatgttggtattctgattggtctgaataggattccccggactgctgttgtcggactcggtagtggattccgacagatcaatggcgtaaaattcgttcagaagttttatgatcccattttcgtccaataggtcatggtcgaaatgtttgcgaatcaaaatttcatgcttccccagaagctctattaccgtgtggtaattctttagatgttcattcttgctccaggcatcattcgcatcgtgaaaccgatgtgaatgggtaaagtcaagcacgtatcgcctgtaacttttttgctgtgtggtgacttcgtctttgtaagacttatgggcttgctcaaccaaccggaatagcccttctttaccggtctgcgcaggagtccattggaaacctcgcatcgctcttttcaaaaagagagaggtgcaaagataatttctttgacataaaacattattttaagtattgttgtttgccacctttgcgttgatggcgtttttgttttgagtgctaagatagttatctgcaatggtttttagttgaatatcgtatgtgtcaatcaatccttttttgactataaaacgaaaattactatccatactttctctgttaggtactttatcacgttgcaagcggaaacagtttacgcactttacccatacatcatagggattgtgttgcttaaaggccaaatgtacaaagtacataagtgaagtctgtgttttcatccatactataggatgttcaaataccgtttcatcgaaaatacctttgaatgcggcaaatgtggtgtcggaggagatatatccaccgtcaagtagggcagagaacatggaatgtatctcatcttcgctattcggactgtaaaatacaactttgctcgtatgaataagccgttcatcagaagtttcttcattgaacgtattttcaatgtgtttgaacttatcacagatagcctttaatctaacatcatacctatccaaccatccggctcgcttaatccaactgtaacctgatacaaaacaagctttgtgcggagtgtgtccgtttatgctgaaacaacattctccttttatccacaagtccttcttgttgaatttgtaaaatgcctgatagacgaaaaaggacaactgccgttgcgttttaatccattctaccggcttgctgaatgtctttttattgaaaatgccgacaaatgttttcaagccagtgtcaggtgcgatgtatccgtatttcactaaatctcgatacaacactgctatatcttcttcactctgtggcgtgtagaatgtctctgtctgatgtgttggctcaaattcagtaaagtcaacttccgggtagagggctttggtcgtttcgtaaagtcccgtattgtatcttggaacacgccaagtgctgaatcgctttccatattcccttttccattgcttttcaaaaaggatgtaggtgctgggaagtttgcagatggtagatacagcataggctatcactttcagttgcagcggcttcgtttgcggcatcggctgatagtgttcatccaagagacctgcgcgtatggctctttgtaataatgtagccacctgttcattggctaaaggctcaatcaaatctttatattcgcctttcacctcctcttcttgccttttgcaaagtgacagcaacgcttgcatattgttcgcataacagtcaattaccttgacgtatgcagaatcaatttccagcctatgactttgtacatagtttacgacaggaacggtaaattcgttatttgttataaggtttgccaaaagaggagagggggcttgttccatatatagacaaatctctttcgcccattttccgatattcatccacgaagagtcaagtgcttcaaattcgatttcgtcatccaaatccaactggcttttcatttcgccgacgattcgggtaatcttcgttatctttataacggtttcttgccttgtcataagcacgggatttaatcaatgtccggaatcaatgatacggcattctgcttgtttttgtcaagcacctttgcataaatttgtgtggtcgccaactctttgtgtcctaatagttttgatactgtgtagatgtctgcgcccaagtcaagcataagcacagcgaaggtatgtctcccgcagtggaaggtcagattcttattgatattggcagccatgctccaacgctgtaattccaatgaagtccaagctccgtatgtaaatcctgtaaatacgggatcttccgggttgcctctttcaccgaggtatttttctgcctgtgaggaaatgtcaagatactcctgtccgccagtcttcttttgtttgaagacgattcttgtgtaatctccaaatttttgaacttcgctccatgtgagtttctgaatatcgcttttacgaagtccggtcaggcatgaaaagaggaaagctctttttagaataggatagcggcaaggagtagcagccaactgttttacctcttccaaggtcagatagtcacgctttacttctgcggctttgaatccctcgattccacgcaaaggatttacaggtatgattctttcatcgtaagcctggttgatacaggcgcggagcttattgaaataagagacttttgagttttgggacaagccttgaaacacatccctttccctacgtggaccggtacgcttgtgagtgtctttttccacattgttcaaaaaatccttgaagccgtttataaactccggagtaatatctttgaatgtggttttctcatcacaatagatttcgagataacgcaagcagcttctccagttaccccagtttccgtcagattcaggattcttgtgtctttcttcaaccatcttccgatagtattccagaaaaggagtatcttctttgaattggcgagtgaaagaatactctccattctgcatttcaatgaggcgtttggattttatagcctgggcggttgccaatgtctgtctgttttgctcacgctccagcggagtagtggcatcgatcagataaagtttcaaatactctttctgacgtttcccatttctgtagatgtcgagatacaagctcacgttaccgtttgccaacttcttttcccgtaattttacgggttctttctggattgttgttttcttagtcatagcctgttcctattttaatgagagatgtgattcattgtcttcgggggacagatttttgtccctcgcatccctttcgggggacaatctggggacaaaattacgaaaaaaatatgaaaacaggcagaaagtatggagaaaaagagaaaatgcaaatccttataaaatcattgatttttcgcactttacagatttatattttctctttttatgcttttcttttctttgtatcacttgccgatgcaaaaatgttgaaagatattttgaagcaccatatcattcgtaacctcccccgctatgtccgaaataaagaagatacactctcgtatgtcttgcgaaagaaaatccccggaaatctgcgaatcaagtccgttttgtactctatgaatagcttccaaagctttgtttaaagcttcgtaatgtcttacgtttgtcacaataatatcattctgtgtcactgtaggcaagtgtgcggcatcaataagcattttttgtagctcacttgtattcttccgttgtttggccgagatgaaaatagattccgtagattctttggggaagtcttttaataaagataatacattctctttctgtttatcttcaatcaaatcagccttattgaatacaacaatcaaatgttttccttcgcaacgtggaattattttctccgataactgttcaatttgagaagcggcattcacagcatctaccatccaaagaacaatctccgcctgatccaacttctgaaaagtacgttcaatacccaaactttcaatcgtgtcattggtttcccggattccggcggtatcaatgaaccggaaagtgattcctccgatattgacagtatcttcgattacatcacgtgttgtcccgtgaatatcactgacaatggctttatcctcattcaataatacattcagtaaagtcgattttccggcatttgtttcaccgatgatagctacgggaacaccattcttaatggcgttcccgacactaaatgaatgagccaaccgcgaaatgacctgttcaatttcatctgccagtttccttaatgccgaacgatcggcaaattccacatcctcttcgctgaaatccaactccaattcaatcatggaagtgaaattcaacaacttgttgcgtagatctgtcagctctttactgaatccaccccgcatctggctcattgccaatcggtgagtggcagcagatgaagaagcaatcaagtccgccacagcttctgcctgacttaaatccatttttccattgaggaaagcacgttgcgtatattctcccggctgggccatgcggcaaccgtttttaataagcaactgcattacctgttgaagaatataagtggaaccatgacacgtgatttccgtactgtcttctcccgtatacgaatgaggagcacggaaaaggctgacgagcacttcatcaatcatctcgtctccgtcataaatacgcccgaatgtcaaagtatatggtttttgttcgctcaataatttgccagctttggctggcttgaagatgctgccggtaatagaaatagcttccggaccggaaacgcggatgcttccgatagcaccgccttgagcggtagcgatggcacagatagtatcttgaatcattgttttttctttttggatgagcaaagataattgtttctaagtaaaaaacagaaaattgagcacaacttgtgctttatttgtttatatttgctgccatgcagtggtacaccaaacaaaataaaacaataatgcttatggaaccagcgattaatttatattcttccaatgaaaagagtgaactcatacgggagaactcacaagaaatactttctgtccttgcagctcatcaaatagctttgtgggaatatgatatcattacgggcaaatgctccttttcaaacgattatttttttacactgggattaaaggatgccgggatcatttttgaagatatagatgatttctatcggtttattcatccggaagatattgaattctataaacaagcctttgcagaaatgctttcatcagactctaagacctcacaaattagagttcgttgtataagtgaacaagggaaagtaatttggctggaagatcattttctgtcttacaaagagagttgcgaaagtcatccgggtaaactgctggcatatacggtgaacgtcacttcacaatgcgaaaaggagcaacatatcaaatatctggaagagtataatcgcaaaataattgaagcattgccggaattcatttttatttttgatgataatttctttattaccgatgtcctgatggcaccgggaacgatattgcttcaccctgtggaagtgctacgcggagcagatggacgatctatttattcaccggaggttagcgacttgttcatttgtaacattagggaatgtttgcgtgatggtaagttgaaggaaatagaatatccgcttgaagtggatggaagtctgcattattttcaggcacgtatcgccccctttgaaggaaacagggtacttgcgttgatacatgatatcggagaccggattcagcgttcgcaggaattgatcgaagctaaacgtcgtgcggaagatgctgataaaatgaagtcggtctttttagctaatatgagccatgaaattcgtactccgttgaatgctattgtcggtttttcggagattatcgcagtgacagaaagtgaagaagagaaaatggagtatctggaaattattcagagaaatagcaacctgttactgcagttgattaatgatattttagacctttcccgtattgaatccggcaaatcggaaatgcatttccagcaggttgagatcgcaggactagtggaagaagtggaaaaagtgcaccagctgaagatgaagtcgaatgtagaattgaaagtgattcgtcccgaaggagaatactggacttctactgatcgtaaccgtgtgatgcaggtattgttcaatttcttgtcgaacgcgattaaaaatacggaaaagggaagtataactttaggcttgaaacatgaaggaccctggctgaaactgtatgtcagcgatacgggttgcggtatatccaaagagaaactccctcaaattttcacccggtttgagaaactgaatgattttgtgcaaggcaccggattagggctttcaatttgtaaaagcattgtagaacgactgggcggccgtatcgaagtaacttcagaattagggcaggggagtatgtttgcactctatttaccctatcaggaaataccgaaggaggttgccgaaagaagacttccgcataagaagaatgtcgatgaggataaacgtaaaaagatattggtggtagaagacattgagtcgaactttgtccaacttaatatttttctgaataaggaatatattatttcatgggtacgcaatggacaggaagccatcaatagttttatccgcgaaaagccggatttgattctgatggatattcgtatgccgatcatggacggtattcaagccactgaaaagatccgtactatttctctgactgtgcctattattgcagtgaccgcgtatgctttctatactgaacagcaacaggctattcaggcaggatgcaacgctgttatctcaaagccctattctttggaaaggttgaaagagacaatagaatcttatatcggataattaattttctaaaagagaactaacattctgaatgttgtagtgttatttattatatagtagtaacattataatatattagaatatggagaaagtgaaaaagatagtccttatcggggcaagcggctttgtgggctctgcccttctgaatgaagcattgaatcgtggtttcgaggttacggcagtggttcgtcatccggaaaagataaagatagagaatgaaaatctgaaagtggtgaaagccgatgtctccgcgcttgatgaagtggctgccgtttgtaagggtgcagatgctgttattagtgcattcaatccgggatggaataatcctgatatatacgatgaaacaatcaaagtttatctgaccattattgatggagtgaagaaagcgggtgttaatcgttttttgatggtgggcggtgccggttctttgtttatcgctccgggcttgcgtctgatggattccggtgaagtacccgaaaatatattgccgggagtgaaagctctaggagagttttatctgaactttttaaagaaagaaaaagaaatagactgggtatttttctctccggcagcggatatgcgtccgggagtacgtacaggacgttatcggttgggaaaagatgatatgattgtagatattgtaggaaacagccatatctctgttgaagattatgccgccgccatgattgatgaactggaatatccgaaacaccaccaggagagatttacgattggttattaataaaaaaacaatggcttgaatctatacatattatcagtgaaagattcaagccgttatacattcttttaattgcaattttattctttcgattacaatttaactctcctgaatatagatttatatcctgtcaagtactgtcttaatcagcgtatcgattgtattcttatatccggtgttggcctctttgataagtcggttggctatcaccatgcagacggtcattgccttgtgtcccatcaatcggctaaggcctgccaaagccgaactttccatttcgaagttggtaattttgtaacctttatattcgaacgcttcaatcttatcattctgtttcgggtctgctaacgggatacgaagttcacgtccttgaggaccgaagaaacctccggcagcgattgtcactccacgtaccatgtcatctttggcgatccggtcgatcaattcttcactggcatcaatgacgtaaggagcaggagcgcacatatttcccgaccaacccatgtgattgaggaaagcacgttcgaaaggcaaatcgcatacggcattacgcccggcatagaaattcagtaacccgtcgaaaccgatggacttttgcgaacatacaaaagttccgacaggcgtattgggttgtagaccgccacatgtgccgatacgcactaattccagttggcggaactgatccttttcttcacgggtgacaaagttgatattggcgagtgcatctaattcattcattacgatgtcgatgttatcgcaaccgattcctgtagagactaccgtaatccgtttacctttgtaagtacccgtgatggttttgaattcgcggctttccacttcacattctttgttttcgaaatgagaagctacgagtgctacacgtccggggtcacctaccaggattactttatctgccaaccattcgggttttacgtgaagatggaatactgaaccgtcttcattgattatcaattcagaggatggaaagtactttttcatgtcattgaaaggttttagttttataataggattgtatctataaatagaaacgccggaaccggatttaagttcagaagaagtctctttctttttccataggaaaggggagaacgtcttacgactgaaataaaatcggattccggcgtttgtgaacgattatttgctcaatggctgattgccagcattgcctgttgtcggcttggcgatattctcacgcatggaagtatcagcttcgatattcttcatgcgataataatccatgatgcctaagtttccactgcggaaagcttcagccattgctttaggaacttctgcttctgcttcgatcactttggcacgagcttcctgtgcttttgctttcatttcctgttcggaagctactgccatagcacggcgctcttcagcttttgcctgtgcaatattcttatctgcattagcctgatcgatttgcagagccgcaccgatgttcttacctatgtcgatgtccgcaatatcaatagacagaatctcgaaagcagttcctgcgtccagacctttacgaagtacaagtttagagatagaatccggattctccaataccgatttatggttttcagaagaaccgatagacgaaacgataccttcacctacacgggcaaggatcgtatcttcacctgcaccaccgaccagctggcggatattggcacgtactgtaacacgagccttagctatcaactggataccgtctttcgcaacagccgttacaggaggagtatcaatcactttcgggtttacagacatctgtacagcttcgaatacgtcacgtcctgccaggtcgatagcagtagccatctggaaaggcaattcgatgttggctttcgatgccgatactaaggcgtgaactaccttttctacgtgtccgccagccagataatgggcttccagttcgtcgcgggtgatatttttcagaccggctttgtgggcttcgatcattcccggaacgatgatatacggcggaacgttacgtatacgcattaagaatagttgtatcagcgagatgttaactcccgaaactttagccgacaaccaaaggaagaacggcacgtaatggaaaaatattatcaagaagataatacctccggctatcagaaagataggcaagtagaaagatgattccattgatgtttttattaagtgaatattattctttgtgtttctcaaccatgattgtaccgtcggtgatccggcttacgattatcggagtcttctcattgaggaacccgtctattgactttacctctacaatttttccgttaatctcggcataaccgatttgtgccaggcgggtagtactgattcctatatcacccactttgacgctatcttctgcgctacggtctacttttgaatcgatatcttttttcaacgccagtttgtccagcattttcgatcgcataaaccaaatcagtgatccgatacaggcaaccgctgatatgccaagagtgacaaatcctcctgccatacctaaattggtgaatgcatagtagttggcatacaggatgcaaaccaatgcagaaattccggccagactaatgcccgggatgacgaacagttctaccagaaacagtatgactgcggcaataatgagaacggcgataatgagtatatccatagttcagagttattatttattttgttttttctgcattacgtacattcacttcgagagcatcgagttcttcggacatttgcagtatccgcttttcgaggtcgagaatggcaggagccattttggcttttccctgttggttggcaccggcatattgttgacgaaggccgttcagcttttcttcttgttgataatagtctttttccatctgctgatagcgttggaaaagtgtcttggcttttgcggatttaaagtcgctcatcagatagtaagtcgtatggtcgtcaatgacaaactcaaagtccatggcacggcgttctttgggcttatgactgatagcagctttcaatcgttgcagtgcttcggtaaccgcttgtttatccttccaggtttctttcagcgaatgaatctgtgccagacgaatgatctcttgctgctccattgcttcataattataagtctgtttggaagtgttagggatgaatacataaatacatatctttccttccggttggaaacggtcggaagcaaaccatccgaggttgttgtattcatcgatgacgtacatataatcgttgtacggcgagttgaacggcatacccacattttccggaacaagataagtgtcggtattcgtgttgtagcgagtgacaaaaatatcatagccacccaatccctcgccatcgctggcgtaataaacggtgactccatccgatagaacaaacggataattcgcattcccggaagcattgatactacccggtaacggacgtccgtcactccattcattcaacaacttgttctttgaaaagatatcaagattacctttctcgcccttttcgctataataaattttatttccgatttctgtttcataaacagttcccggatgatctccttctgtcttgaagaattcattgaaagtaaacagtttgcccgattcttcgctgatcttgtaagcgttcaggaaagttgctttgtccacaacgaaactgtcgatgatacatacttcctcaacccccttcaacatacgaaggtcagatttgcttttctccagaagtttctccgcttcttccgtcggtttcttgcgtttacttaagtctgcgatgtattcttcaaagcagttcactgcgtcttcaaagcggtacgtctcattatatgcttgtcccaaatagagttgtccaccggtgatacgtttctttaccgctatttcaagaggtttcaccgcctcttccgcctctccggttttcaggcaacatacgccataccaataattataattcccgttcgacggttgtgatttagtatacttcttaaaaactggtttggcttgttcgtactcacctttggtaaataaggtgcgtgcctgttccaacgtttgtgcagagacttcgcaaaggaagaggctgcaaattaaaaatagaatatattttcctttcatcgttttgagcgtttatgagtgacgggtagattgaaaacatcgctgctttcgggcaccggtccatttatcaattgttcaaaagtacaaatttattagaaataaaccctttttcagtgattctattatgttaattcttctttaaatcattcttttcgcttacttttgcagccgatttttaaagatatgacacaatttacggaagaagagaaaaccattcgccgcattgaacggcggtttagcaaaggagtggtgcaatatggattgatagaagaaggagacaaaatccttatcggactatcgggaggaaaagattcgttggcgcttgtggaactgttggggagacgcgcacgtatctataaacctcgcttttctgtcgttgccgtccatgtagtgatgaagaatattccttatcagagtgatacggaatatttgaaagcgcactgtgagacgtatggagttccctttgtgcagtatgagacagcttttgatcctgctaccgacacacgtaaatctccctgcttcctctgttcatggaaccgtcggaaagccctgttcacagttgccaaggaacacggatgcaataaaatcgctctcggtcaccatatggatgatattttggaaactttattgatgaatatcacttatcagggagctttcagtacaatgccgccccggttgatgatgaagaagtttgatatgacaattattcgtccgatgtgtctggtccatgaagctgatttggtagaattggcagctttgcgtcattatcagaagcaagtgaagaattgtccttatgaatcgcagtccagccggagtgatatgaaaggaattttacggcagttggaagcgatgaacccggaagctcgttatagcctttggagcagtatgactaatgtacaggaggaattattaccagataaaatagattaatttgaatagattgttatgaaaggattctataccattttgttactgattgtatctaatgtctttatgacatttgcttggtacggacatttaaagatgaaacaggagtacagttggttcgcagctcttccgctgatcggtgtgattgcgttcagctgggcgatcgccttttttgaatattcctgtcagataccggccaatcgcattggctttataggcaatggaggcccgttttcattgatgcaactaaaagtcattcaagaggtaataacacttgttatttttacagtgttcactaccatcttctttaaaggtgaggctttacattggaatcatctggctgcatttatttgtctgattgcagcagtgtatttcgtgtttatgaaatagatatttgccaattgaatagaggttctgttttactcaagtagaacctctgtttgtataatatatatatatattacggagtagttatgtattttttcattccctccgtataataagtcttgaactctccattttctccactataaataaagtaggcgtcaatcgttgtatccgctttgcagaaagcttccgcttcttccagtcccatcaccatgaaggcggtggcaagggcgtcggcagtcatacagtctttggcgattaccgtagaggacaagatattgtgttgtaccggatagccagttctagggtcaatcgtatgggcgtatttcttcccatccttataataataattgcgatagtttccggaagtagccaagcctaaatctgttatctcaagaattgtctgtaagtcttggtttacggccagtgaatcgtcgatgggcttattgattccaatgcgccataagcctttggaaggatttttccctttcactaccacctcgccgcctatatctaccatatagttttttattcccttacggtcgagcagttgtgcaattacgtctaccgaataccctttggccacggcactacaacttaacatagtacgaggatcctgtttgataactttgccgttatccattttcactttttcatatccggtgatttgtaacagactgtctatcattaatgaatcaggaaaagcaccttttttgaaaccgaatccccaagcattggcaagaggggctactgtaatgtcgaaagcaccctttgtctcgcgggaaatttccatcgagcgatggaagcatttctggaaaaaactatcagtcaccagctcttcattgcggttgacgcgactgataacagaactgtcattgaatggcgataaagattggtcgaagcgttttagttcagcttctatttccggttttaagtcaccgtcatgctgataagtaattttatatactgtcccaaacaccaaacctttgacactgtaatagccaacttgttgattatgtctgactaatatccagatagttgccaaaatcaggaaagccagccaaaggaaacttttttttgttttcatacgctcttctatttgataagaaaactcgttttattgaagaaataaatgttcaattaatatctttagtccgataatgactagaatgatacctccccataactctgctttcagtttccgggcgatgccgcagccacattggataccaaagatcagaccgatgagtgacatgacaaatgaaacaaacccgatgatgctgataggaggaaggatttcggtatagtcctgaactcccagaaaggcaaaggaaatgccgattgccaatgcatcaatacttgtggctattgccatagtcaataccactttcggatttgccggattgaacagtttacaacattcttcttctttgaaagattctaaaatcattcgtccgcctaagaaggcaaggatcgcgaaagcaatccaatggtctacactttctataagatgactgaatgtctttgcacacatccatccgataaatggcatgattgcctgaaaaaagccgaaagcaaaagccatgattagcatgggtttccaacgggtacgtttcaaaataataccgcttgcaattgagacagcgaaacaatccatcgccagacctattgcaagcagccaaatctctagtcctgtcattgtattctaaagaggcaatttataaataagggaataagtgattcccatgttatttgatttaaactttccgtaaccgggcacgtaccatgggtctccatattctccggtagatgctttggttttgtatttcatacgtaccgaccaccccatgttgaagtttttgtaaatacgtactttgacgcctaaaacgatttccagccattgcaccgatcctttcatacccagatggctgaatggcacacttcctccccaataaccgtcttccaaactggggttacctattacatctccccagataggatcatctgccggcattgtggaaacatcatatttaaatgaactgaatgcatagcgaagtcctgcatacaagtagctattcttctcttttttctttgccatggtgttgtagtccacaccgattcggaagaatggggccattttgctcttatagtgtatgcctgtttcgctccaggtatctgttcctcccataccaaactcaatagtagggatgaatttattcttgaggttaacggctacgctgacttcagaactcataaagtcgcctcccagcagcttgcttccaacgccatataaatccacaccgacatacgtaccattgtagagcggaatggtatctatctcggcaacctcttttttcttctgatctcttttgggcgtttgcgccggacgttgctgttgtgccagcaacggaagcccaatgcaaaagagcagaagcagactaattagtcgtttcatcaggtgtgcgttctggccgataattatagaatatctgcaagttctcgatttcatttgtattggcttctttattttttatatgaagagaatctatctggtccggctgcccgttgccatagggaggagggttacccggtcttcccggttttccaaatttagcgctgattatattttgtttcatcatataaccacattccatggactggaaataaggagtattttgttgtacaatgtataatgtgtcaaaatctttttctctacgtttgggatcgtatctgaatatgaacacagtagtgtcacttgtgtatcgtagtggtaacatcagggtatgcacattcttttcattgttcagaatgatagagtcggtgcctaatgctgtgattgttaatgaatcaagcgtgtcttttaatgcaatagtagggttatccggattaatggtatatattgtgcagtacatcatcggacgtcctgccaatgagcaatcgttctcatccgagcaggcactgtgtaagctgactgcaccgccaatgatagtcaatatgagaaagatacgaattaaattcttcatagtcagtttattgaatgtgaatcaaattttcttttctatctgatagttattccgttccggtgcattgcgcgagatgagttcgccaaggaatccggctaagaataattgcgtacctataatcattgccgtaagtgacaaatagaaatagggagagtcggtcaccagtcggtaggggagaccgttgtacatggcatatagtttactggcacctacgatgatgacagaaatcattcctatcagaaacatcaatgatcccaacagtccgaagaaatgcatcggcttgatgccgaatctggagaggaaccaaagagagagtaaatccagatacccgtttacgaaacggttcagtccgaattttgttgtgccgtatttacgcgcctggtggtgtaccaccttttcaccgattttcttgaatccggcgttctttgccaaataaggtatataacgatgcatctcaccgtacacttcgatatgttttacgacctctttgcgataggctttcaatccgcagttgaagtcgtgcaggtttttgatgcctgatactttgcgggcagtagcattaaacaacttggtgggcagtgtctttgaaattggatcatatctcttttgcttccagccggataccaggtcgtagccatcctttgtaatcatccggtaaagttcggggatttcgtctgggctatcttgtaggtccgcatccatcgttatgactacgtttccttccgcttcagcgaatccacagtagagtgcaggtgatttaccgtagttacggcggaatttgataccttttacatgttccgattgagctttaaacttttcgatcacttcccatgaatggtcggtacttccatcgttaacgaaaatcacttcgaatgagaatccgttggcttgcattacccgttctatccaagcatagagttcgggtagtgactcttcttcattgaataatgggattacaactgatatatccatttttttattactaattacttacgaattataaattacgattgagacactccgtcattttccggtttggcctttttcattaccatcaatgcggtgggaatggccaggatacttccccaaaatacatcccatgacaatagttgcatggtgatattgatggaagtaagtgaacgggcggtatctattgtttcttttataacttctttgttttctatcagagccggggtgttggtcatcagttcgtcccacaactggatgtaagagttgatgataaatccatgatcgatgaattggaaataggcgtagtgagccacagctaccagcagagaagcaaacatatacataaatatggtaaagagcatggcatgtgaaaattggatacttcctccgcaaatcttatcccggtacattttcgcatagtgatatccgatgaaaggtacggataatgtcaggattacaaataagagcgaaaggaaaggtatgtggaatcccagcggaaataatatgaacttcaatatccagtagattcccatatacgtgccaaaatgcatggcatatttttgtaaatagcttctgttctctgtcatcttcatttataaattgcgcacaaaggtacaaataatatcggttggtaggggaaatctggttgttaaagttaataaagcagaggaagttgctgtctgaatatttttttgcaattttaattgcctgaaatgtagcctgttagtcttttgttagtaaaaaagttgtctgcagctattgcagaatacataaaaatgtctacctttgcaaccgcaaaacgggtaagtcctatacggccagctcccttcgaatcctccagggcttgatcgcagcaaaggtagttggttgtagcggcgcgatatagatagcttacccacccgcctctttagctcagttggccagagcacgtgatttgtaatctcggggtcgttggttcgaatccgacaagaggctcaaaaaaggatatataacaaatccaagaaaaaagcattcaggtattagtctggatgcttttttatatatattcgcatattatcgaaatacacagttccctaattgttgtaatatcccatttttaagaaaagcaaagatttacagtttctttttgattcattattgttattcattcttgtatattatgctcaggataggagctgagtaaaagcatcacattggataaatggcgttgcaatattccatgaagttgcttgatgatatttatattcccggagagaaaaacgatgaattgcagttgagaggcaatttcttggttcgtttgtttgcgttctttactttcgatgttattttgcattagataaatgcctaatgctttctgaatatcggctattcccttgtcccattcatgttcgccaagtgtttgaatgaaagtacaatattgcttgagctttttgcttagcttttttaaactgttgtattcggtgtcaatgggaggattaatgtgcgcagagcgtattatgtttgacatctgcaaataatacgttttcattccattttcagaattgaatgtagtcaggatatactgtttcgtagcttctgaaacctcttcctgtaagtcttttaattgactgttttccataatcattagaatttaaaagatgaataatagattgatgggagaggaagaagtgctaataaaaaagcggtttcgcctgtcccattgtctaacataccgacggcaggtttagaggtgcattaacactctctatggggggacgaaaccgcccatataagagttcacatacgaacataaaaatgctcgctgcgatagtaggcaggtttccccaccgtctgttaatatgttagacgttgcaaatgtagccttattaattcaattcgcaaaatattggagatatttattgatgcttagtgaagctagttttcttacaatgcaaaaagatttagtgaatggttaatatgtaaaaatccccggataatctaattgtccggggatgaattattcaagtaagagaatattgaattatttaattctcttgtaaccatatacagccaaatctcccagttcctcttcaatgcggagtaactgattgtatttagccatacggtctgagcggcttaaagaacctgtcttgatctgtccgctgttagtagctactgcgatatcggcgatagtagcatcttctgtttcacccgaacggtgagaagtaacagtagtgtatccatgacggtgagccatttcgatagcgttcagtgtttctgtcagcgaaccgatttggtttactttaatcaggatagagttggcacagcctttttcgatacccattgcaaggaaatctacgttggttacgaacaggtcgtcacctaccaactggcaacggttgccgatgcgttcggtcagctttttccagccttcccagtcgttttcgctcataccgtcttcgatggagtcgatagggaacttgttaatcagttcttccaggtagtcaacttgttctgcggaagtgcgtttcttacctttttcaccttcaaacttggtataatcgtaaataccatcgtggtagaattcggaagaagcacagtccataccgatcataacgtctttgcccggttcgtatcctgctgctttgatagcggccagaatagaattcaaagcatcttccgtaccttcgaggttaggtgcgaaaccaccttcatcacctacagcagtgctaaggccacggtctttcaagactttctttaaagcgtggaatacttcagcacccatgcgcagaccttctctgaaagaaggagcacctacgggacggatcataaattcctggaatgcgatcggagcatcgctatgtgaaccaccgttgatgatgttcatcatcggtacaggcattacatacgtatttgttccaccgatatagcggtatagaggaagatccagatagttggcagcagctttagctacggcaagagatacaccgagaatagcgttagcacctaaattcgatttagtcttagtgccgtccaatgccagcattgtgtagtcgatacctctctgattgagtgaagacataccaatcagtttcggagcgatgattttatttacattatcaaccgctttttgtactccttttccaccatagcgctgtttgtcaccatcgcgaagttccaatgcttcgtgttcacctgtggaagcacctgacggcacagatgcacgtcccataatgccggattccaatactacgtcaacttctactgtggggttacctcttgaatcgagaatttctcgagctacaattttttcaattttcatcgtttctattgtttttgaataagatttctgcaaaagtacggacttgacggggagtgagaaatcactataaataggtattctttttgtgcctattccctatatgtcgttagtccgaccttatactataacaacgggacgatgctttttgtttgagtgcggcggggtgaatttgcaggattttaatcttcgataataacccctaacagtggaagcaaatccattgcttgcagggaagtgatgacagcccctttcagatcgctgatgttaagcgtgattccgctgatacgggaagtgcgcaaatctattccgcgaagcggagcgtgtgaaaaatcggcttctacgagatcgcaactctcaaatgcgacggatgaaaaacggcagtcgttcagacttccgttgcggagctggctgtgtgcaaaacgtacctggttcattttactcatagccagattgatataacctgcgttgcagtcatgcagcaagacgtgattcatcgttgtttccgataaattggtacccaatagtttgcaggaaatgaattctacccggtagagcgaactttcagcaaaagaaatgttggataggtcgcagttctcgaacctgacatcgctcagttgagaggaacggaatttacattcgctgaatgtctgatgctgaaaggtgcagtttttgaaacttttgtaagatttgtcgatgccttcttcttttcctttgcagaataaaagatgagagacggtttcttctctgtcgagccattcctgtagggtaatagtactgacttcctgttcttccatcatgggaggaacaacgcggacgggtttggttgggtttcttttaatcatgccgtaaaggtaggatttatattcgaattattaaatctgttttcccacatatccgccggctaacgttgcggctaatcctattcctatacttaataatgtatatagaacaaatgctccgtaaaattctcctttcagcagacctacgccatcactggagaaagtagagaacgttgtgaaacctccacataaacccgttgtcagaaacaaacggacctcgaacggaaggtggaatcgctctgaaagagcatagaacagaccgatgagaaaactgccgagaagattgaccgtgaaagtggcccatggaaaatgataagggacgattcgttcgtgcattaacaactggataaaataacgtagtgcactaccagttcctccaccgataaagatatagataacttctttactcatttgattgaaagattgatattatttgtaggcggcttcaaaatccttttcgaattgttggaagcctccgggataaactaaggtgttgtgtcatataaataataaaatgtttgttgatgtgattgagataataatctgcaaatatagaaagattatgcaatattcatatttaatccttttaatttaatcaccatagacactatatttttggggggagacaaaatgtgttatctgttttattattaagtacttatttcgtttttgaatctgtattcctctatattttctttataaagaaaaacactacttggatttccggtctatctttgccatacgattattaactaactcatttatatcatgaagaacatgaaaataggaactgcaatgtgggtctgcctgttgctctcttttttcttcggcacatcagcaaaggccgaaagtatcacttctcctgacggacaattaaaacttaatttctctgtcaacatgcaaggagaaccggtgtatgaactctcttataaaggaaaagaggtgattaaaccttcgaaactgggactggaattgaaaaatgatcccggactgatgaatggattcactctggccgatattaaaacttctgcttttgatgaaacatgggaaccggtgtggggagaggtgaaatcgatccgcaaccattataatgaaatggctgttaccctgaatcaaaaggcgcaagatcgtaatctgattatttgttttcgtctttataatgatggcttggggttccgctatgagttcccgcagcaaaagaatctgaattacttcgttataaaagaagaacattcgcagtttgctatggccggcgatcatacggcattctggattccaggcgattatgatacgcaggaatatgactataccgaatccaagctttcagagattcgcggattgttgcaaggggcaattactccaaatgcttctcaaactcctttttcaccaacaggtgtgcagacatctttgcaaatgaagacagccgacgggttgtatatcaatctgcatgaagcggctttggttgattattcttgtatgcatctgaaccttgacgatcagaacctgatttttgaatcatggctgactcctgatgcaaaaggggataaaggttatatgcaaacgccttgccgttcaccctggcgcacggtgattgtcagtgatgatgctcgtgatattctggcttccaaattgactttgaacttgaatgaaccttgtgcctacgaagatgtttcctggattaagctggtgaaatacatcggtgtgtggtgggaaatgattaccggaaaaagttcctggtcgtacacggatgatgtttattctgtgaaactgggacagacggattattcccaaacaaaaccgagcgggcgtcatgcagccaataatgacaaagtgaagcgttacattgactttgcttcagagcatggattcgaccagatcttagtggaaggctggaatgaaggctgggaagactggttcggaaattcgaaggattatgtctttgatttcgtaactccgtatcctgattttgacgtgaagatgctcaatgcgtatgcaaaggaaaaaggagtgaagctgatgatgcatcacgagacttccgcttctgtacgtaactacgagcgccatcttgataaagcctatcagtttatgatagataacggatacaatgctgtgaagagcgggtatgtaggtaatattattccgcgtggagaacatcattacggacagtggatgaacaatcattatttatatgcggtggaaaaagcggccgaatataagatctgtgtaaatgctcacgaagcaacccgtccgacaggattatgtcgcacatatccgaatctgatcggtaatgaatcggctcgtggcacggaatatgaagcctttgcagggaataagccgttccataccaccttgcttcctttcacccgtcagattggtggaccgatggattatacaccgggtatctttgatacaaaactttctttcctgtcaggcgaccacagttttgtacgtacaactttggcaaaacagttggcactttatgtaacgatgtacagtcctttgcaaatggcagccgaccttccggagagttacgaacgtcacatggatgcatttcaatttatcaaggatgtagccgttgattgggatgacagcaagtatctggaagcggaaccgggagattatattaccgtagcacgtaaggcaaaaggtactgataactggtttgtaggtggtatcaccgatgagaatccccgtacttctgcttttacacttgattttctcgaaccgggaaaacaatatgtagctactctttatgctgacggaaaggaggcggattttgaaaagaatcctacttcttaccagataaaaaaaggacttgttacaaacaagaataagatgtctgtgaagctggcacgtagcggaggatttgcagtaagtttgattgaagcaactcccgctgacttgaaaacgatcaagaaatggaaataagattccggtaaaaagattgtttccggattccccgctttttaataaatattagttgtgcttcgcaaagaaaactaaaactttgcggagcgctttttttataggacgaattcttttttgtacttttgcgccatcttttttaaaacatcatcaataaagagaacaacatgggaggttttttcggaacagtctcgaaaactagctgcgtgactgatttattctacggcacagattataactcacatctgggtaccaagcgaggaggactcgcaacatatagtgaggaaaaaggttttatacgctccattcacaatttggaaagtacttatttccgaaccaagtttgaaggagaactggacaaattcaaaggaaacgccggcatcggcatcattagcgacacagacgcacaacctatcatcatcaattctcacctcgggcgcttcgccattgtcacagtcgctaaaatagtcaatatccaggaattggaagaagaacttctcagtcaaaacatgcacttcgccgaacttagttcgagcaacaccaaccagacggaacttatcgcattacttattatacaaggcagaacttttgtggaaggtatcgaaaatgtgtttaagcacattaagggttcttgttcgatgttgcttctgacggaagatggtagtatcatcgctgcccgtgaccgatggggacgtactccggtggtgattggaaggaaagacggtgcttatgctgcaacgagcgaatcgtccagttttccgaatctggattatgagattgagagatatttaggtcccggtgagattgtccgtatgtatgacgatcatgttgaccagcttcgcaagcccaatgaggatatgcagatttgctcgtttttgtgggtgtactacggtttcccgacttcttgttatgaaggaaagaatgtagaggaagtgcgtttcaccagcggattgaaaatgggacagacagatgaatcggaagtggattgtgcttgcggtattcctgattcgggagtgggtatggctttaggatatgccgaaggaaagggggttccttaccatcgtgctatttcaaaatatacaccgacatggcctcgtagcttcactccgagcaatcaggagatgcgttcgcttgttgctaagatgaagttgattcccaaccgtgccatgctgcaaaataaacgtttgttgttctgtgacgattcaatcgtgcggggaactcaattacgtgacaatgtgaagattctgtatgattacggagcaaaggaggtgcacatgcgtatcgcttgtccgccattgatttatgcttgtccgtttgttggtttttcggcttctaaaaatgcattggagttgattacccgtcgtattatcaaggaactggaaggggatgagaataagaacctggagaaatatgctactactggttctccggaatacgataagatggttagtattattgcagagcgtttcggtctcagttcattgaagtttaatacactggaaacgctgattgaggctatcggattacctaaatgcaaggtttgtacacattgctttgatggtagtagccatttttaaagtagtcaaataggatatttaagtatccggataaaagtatacaataaaaagagccgtgaattgctttgtaattcacggctctttttttacctttacggcactataaactatcaatttgtaaattgtaattagtaacttgtaattaaaacaatatgactttagtagacagatttttaaagtatgtaagcttcgatacacaatctgatgaatcgacagggcttactccaagtactccgaagcagatgatttttgctgaatacttgaaaaaagagttggaatctttgggattggaagatattactttggatgagcatggctatctttttgctacacttcctgccaatatagataaagaagtacccactatcggatttattgcccacatggatacaagtcctgatatgacaggtaaagatgtcactccgcggattgtggaaaaatatgatggctcggatattgtactttgtgctgaagagaatgtgattctttctccgtcgcaattcccggaattgctggatcataagggggaagacttgattgtaaccaacggaaaaacgttgctcggtgccgacgacaaagcgggtattgcggaaattatatctgcggtggtttatctgaaggaacatcctgaaatcaagcacggtaaaatccgtatcggtttcaatcctgacgaagaaatcggtgaaggtgctcataaattcgatgtagagaaattcggttgcgaatggggatatacgatggatggaggtgaagtaggggagttggagtttgagaactttaatgctgctgccgcaaaaataacctttaaaggacgtaatgtgcatccgggatatgccaaggataagatgattaactctatctatcttgccaatcagtttattacgatgcttccctcacaggaaagaccggaacatacgaccggctatgaaggattctatcatttgatcggtattcagggggatgtggagcaaagcactgtgtcttatatcatccgcgatcatgaccgtgcaaaatttgagaaccgtaaaaaagagatagaacgtctggtagctcaaatgaacgctgaatatggagctggtactgcgacactcgaactgcgcgaccagtattataatatgcgtgagaaaatagaaccggtaatgcacatcatcgatactgcttttgcagctatggaagccgtgggtgtgaaaccgaatgtaaaaccgattcgtggaggtacggatggtgcgcagctttcttttaagggattgccttgtccgaatatctttgccggtggtctgaatttccacggtcgttacgaatttgtgcctatccagaatatggagaaagcaatgaaagtgatcgtaaaaatagcagaactggtggcttccaaataaaaagacggtaagctctggtaatacttaatacctgatacttaaaacttaatactttaaaataatgaaaaccactccgtttacagagaaacatatagcacttggtgctaaaatgcacgagtttgcaggttataatatgcctattgaatactccggtatcattgatgaacacataactgtttgtcaaggtgtcggtgtatttgatgtatcgcacatgggagaattttgggtgaaaggaccgcaagcgttggcctttctgcagaaaataacatctaacaatgtggcggcactggctccgggtaaaatacaatatacttgttttccgaatgaggatggggggattgtagatgatttgctggtttatcagtatgaaccggaaaaatacatgttggtggtgaatgcttccaatatggaaaaagactggaactggtgtgtttctcacaatacggagggagccgagttggaaaattcgtcggataacatagctcaacttgctatacagggtccgaaggctatttcggttctgcaaaagttgatggatattgatcttgctactattccttattatacatttaaggttggaacgtttgcaagtgaagagaatgtgattatctccaatacgggttataccggtgcgggaggttttgagctttatttctatccgtctgcggctgattctatatggaaggctatttttgaagctggtgaagagtatggcattaaacctatcggtttgggtgcccgtgatacgctccggttggaaatgggcttctgtctgtatggcaatgatctggatgatacgacttctccgatagaagccggattgggatggatcactaagtttgtggagggcaaggattttgtcaaccgtccgatgctggaaaaacagaaagcggaaggtgttacccgtaaactggttggctttgaaatggttgatcgcggaattccccgtcatggctatgaactggtgaatgatgaaggcgagaaagtgggagtggtgacctccggtacgatgtcgcctacccgtaagattggtatcggtatgggatatgtgaaaccggaatatagtaaggtgggtacggaaatctgtatcgatatgcgtggtcggaaattgaaagctgtggtagtgaaaccgccttttagaaagtaaaaaataagcttgttattgtgtatagccccggataagttacgactctatccggggctaacttattttatgatggttattgcaaaacatattcgtaaatatgttgtttatcccatagaaataatataattttgtcatcaaatacgataaaataatgtctcaattacctactcttatagctgacctcgcacttatattgatttgtgccggtgttatgactttgttgtttaagaagttgaaacaacctctggtcttgggatatgtagttgccggatttctggcaagtccgcatatgccgtatactccttcagtgatggatactgccaatattaagacttgggcggatattggtgttattttcttgctgtttgctcttggtttggaatttagttttaagaagattgtcaaggtgggtggttctgccatcattgctgcctgtaccatcatcttttgtatgattttgttgggaataggagtcggcatgggtttcggctggcacaggatggacagtctgttcttgggcggtatgattgcgatgtcgtctactactattatttataaagcttttgatgatttaggattaaggaagaagcagttcaccggacttgtgttgagtatcttgattttggaagatattttggctattgtattaatggtgatgctttccactatggcggtaagccaacattttgaaggtaccgagatgttggagagtatcgggaaattattgtttttccttattctgtggtttgttgtcggtatctatctgattcctgaattcttgaaacgctgccggaaattgatgggagaggagactctgcttattgtgtcgttggcactttgtttcggtatggtagtgatggcggctcatacaggattttctgctgcatttggtgcatttataatgggatctattctggcggaaacaatcgaggcggaatccatagaccggctggtgaaaccggtaaaggatctttttggagctatctttttcgtatcggtcggtatgatggtggatcctgcaatgattgtagaatatgccgtacctattatagttattactttggctgttatcttgggacaggccgtttttggtacattcggtgttattctctccggaaagcctttaaagacggctatgcaatgcggctttagtttaacgcagatcggcgaatttgcgtttattattgcttctttgggagtctctttgcatgtaacgagtgactttctgtatccgatagtggtagcggtttctgtgattactactttcctgactccttatatgattcgttttgccgagccggcttctacttttgtggatgctcatcttccggaatcatggaaaaaaataatgatgcgttattcttccggttcgcaaacagctctgaatcacgagaatttgtggaagaagctaatcttgtcaatggtacgtataacagttgtttattcaattgtcagtatgtcgattattgcactttcttttcgttttgtcgtgccattctttaaagagaatctgcctcatttctgggcatcattgttgggagcggtatttatcattctgtgtattgctcctttcttgcgtgccattatggtgaagaaaaatcattcggttgagtttatgaccttatggcatgacagccgtgccaaccgcgcaccgctggtatcgacaatcgtgattcgtattatgatagcggcactttttgttatctttgttatttccggattatttaaggcgtctatcggattgattattggagtggctgtacttgttgtattgttgatggtatggtctcgccgtttgaagaagcaatcgatattgattgaacgtcgtttctttcagaatctccgttccagagatgtacgtgcagagtatctgggagagaaaaagccggagtatgccggtcgtttgttgtcgcatgatttgcatcttgccgatatggaaattccgggtgaatccagttgggcgggaaagacattgatggagctgaatctggggaagaagtttggagttcatgttgcttctattcttcgtggaaagaggaggattaatatccccggtggttctgtccgcctgtttccgatggataagatacaggtgataggtacagatgaacaattaagtgtgtttaatgaggcgatgcaaaacggagcgaagatagactgggaggtctatgaaaagagcgagatggctttgaagcagtttatcattgacagtgattctgtttttctgggtaaaacgattcgtgaatcgggtatccgcgacaaatatcattgtatgatagccggtgttgaaagtgaagacggtacactgatggttcctgatgtaaatgctccactcgaagaaggcgatgttgtttgggtggtaggcgaaaaagaggatgtgtaccaattagtcgatcaaaaaaacgaaaaagtacaagcaggataagaatggaatacttatttttgcaacgataaaaacttaaaataataatatcatgaagagtgatccgaaagaatgtctgtattgccagaacaatgaaacgctgcataatctgatgattgagattgcgcaattgagtgtgtcacgtgtgtttttgtttaaggaacaaacctaccgtggacgttgtcttgtttcttataaagaccatgtgaacgatttgaatgaattgagtgatgaagatcgtaatgcttttatggcagatgtagcgcgtgtcactcgtgccatgcaaaaagctttccagccggaaaagattaattatggtgcttactcggataaattgtctcatttgcattttcatttagcacctaaatatgtggatggacctgattatggaggtatattccaaatgaacccgggaaaggtttatctgactgatgcagaatatcaggaattgattgatgctgttaaggcaaacctataaacggtaaattttgcggggtgccctgaaagggcttaattatatagcgtagggcgttgccctacgctatataattaagccctttcagggcacccccaataaatatataattgtaaggctttcagcctaaccgataaattctcatttaaccgctaaattcccatttattattcttcactgtcaaaatcgaaatcaaagtcgaaatcatccatgaactccggagttgtaaattcttccagttcccgacgatctttcttggtcggacgtccggttccacgtgcacggtctacgaatccgctgattttactcatttcaagcagttcgtattgatcgggagtagttacgttttccatcatttccgatacaagtttggctcccacacgtttttcaatagtttgtaataccttgaatgaataagtgataggcggtttcttcacctgaataacgtctcccggttttatcatacgggcagctttggctagagaaccgttgatggtaatacgtccttttttgcaggcttctgctgcaatcgtacgtgtcttgaagatgcggacagcccacatccatttatctattcttgcttcggccattttagttagttgtttagtgataagcaattcgttggttagtatcagttgacgttgtcatttatcgctaaccgttcattgctatctttatttttataggactagtctattattttttattgaactggttcatcgtgatgtcaataccggcgagacagaaactttttataatttcccctgccatctccagtctttcatccattgttttccaatcttcgtcagtgaagtgtccgagtacataatcaacctgtccgccacgtggaaaatcatttccgataccaaatcgcaggcgggcatagttttgagtgcccagaatagcggcgatatgcttcaatccattatgtcctgcatcactcccttttcccttcaggcgtaaagttccaaagggaagagccagatcatctactacgatcagtacattttccaatggaatattttctttctgcatccaatagcgaacggccagtccgcttaggttcataaaagtcgatggcttaagcaaaatcaactggcgtcctttgatagaaaagctggtagtgaatccatatcgtccatccataaaaggaggagcgttattgattctagccaatgcttctactgtcatgaatccgatattatgtcgcgtttcatgatattcgggaccaatgtttcccagtccgacaactaagtattttatcatcgtatttccgtaaaacagttcattaatatagaaagagaaacgcagattaatacaaattaatgcagactgaacatctgctttaatctgcattaatctgcgtttgaagtatatctctttacagggataatctcaattacttaccagcggctgctgctgcacctcttgctgcacgagtcaacttaacagcacatacaacggcttcttttgcactaatcagttcaagaccttcgaagctcaattcgccaactttaacagtcttacccaagcccaggtgagaaacgttaacggtcaacttttcaggaattacattgtacaaagctttcactttgatcttacgcatctgcagtgcaagtttaccaccggctttcacaccttctgcaagaccttccaattgtacaggaacttccattacgataggtttagcttcgtcaatttgatagaagtcaacgtgtaggatagtatcttttaccgggtggaactgaatatctttcaggatagcgtttacttttttgccatcgataatcaggtctacaacgtagatgtgcggagtataaaccaagttacgaagtccttcgttagtcactgtgaagtgaactacttcattacctccgtaaagtacacaaggtacaccaccgtttttacgaatttctttcaaagctcttgcttgttctgaagagcgttctgcaattgttcttgcagttccttttacttcaattgatttcatttctttaaaaaattgtgttactctaaattaagttagtttgcttaattcaccatcacacgatgtggattatcacacgatgttgcaaaaaagcggtgcaaaagtacatcttttttttgaaatatcaaagagttactttcttaaaagtcaatatcaatcttaatttcgctctccaatttgttttcccgggcttcttcgattgctttccgttcattttcttcatcagcttcgatgttcaggcgggcgatatattcgtttgcgtcgctgcactcaatgaaattgactgcttcttcgagtcctgccataaacttctgaaagtcttccctatataggaagattttgtgtttctcgaaactaacttgagaatcatcgccttctcccgttatcacttttttgctctctgtaatagccaggaacatttcatctttacgattcttttttacgtcgaggtaatagatgcgtttacctgccttaatggacttggagaatacgatctccttatcattcatgtctgcgctcattttcttttttaaatcttccatatctttcggtccgtttataatcggcttcaaaattggatattttttttaaactgtcaaaagaaaaagcgcagagaatcaaatactgcattaaaaaatgtgatttattagtggaaactcattaaaaatatctacttttgcagttcgataacaacagtattaatttgaattatgatcaacagagttcttattcgtcttaagattatacagatagtatatgcctattatcagaatggcagcaaaaatctagactcagcggagaaagagttattctttagtctttcaaaggcgtatgacctttacaactatttgttaatgctgatgatagcattgacagagtatgcacaaaaacgtattgatgcggcaaaagctaaattggcacctacgacagaggaattgtatcccaacaggaagttcgtagataacaagtttattgctcaattggaagtcaataaacaattgacggagtttatagctaatcagaaaagaacctggacaaacgaccaggattttatcaaagagctttatgagaaaattgtagaaaccgatatctataaagattatatggcttctgatgacaactcatacgaagctgatcgtgaactgtggagaaaaatctataagacatacatctttaataatgattctcttgaccaggtattggaagaccagagtctgtactggaatgatgataaagaaattgtagacacgttcgtcttgaaaacaatcaaacgctttgatgaaaagaagggtgccaaccaggaactgcttccggaatttaaggatgacgaagatcaggagtttgcacgtcgtctgttccgtcgcaccattttgaattctgactattaccgtcatttggtgagtgagaatacaaaaaactgggatttggaccgcatcgcatttatggatgtaatcattatgcagactgcattagcagaaattcttagtttcccgaacattccggtcagtgtttcgttaaatgaatatgtagagattgcgaagttgtatagcacagctaaaagcggtagctttatcaacggtacgctggatggaatagttaatcaattaaaaaaagaaggtaagttgactaaaaactgatacctttgtccatatagtagaaactaaaacagattatttatgaacgtattgactgtattattgcaagctcctgccggtgctgccggaggtggaagtatgatgtggatcatgctgatagctatgtttgttatcatgtatttctttatgatccgtcctcaaaataagaagcagaaagaaatagctaatttccgtaaatctcttcaggtaaatcagaatgtgattactgcaggtggtatccacggaacaatcaaggaaattactgacgactatatagtacttgagattgcttctaatgtaaagattaaaatagacaagaattctatattcgctgatgcttcagcggctagcaatcagtctaaataaatagttggtaaataaatgcctatgtttgatcgtaggaatataaaatatacatatttaaaactatctaagaaaattaaggattttctgctcagtgataagagcagagagttcttaatttttttatttttctttctgatagccggtggattctggttgcttcagacgctcaataatgattatgaagcggagttttctatcccggtgcgaatgaaagatcttcctaacaatgtagtgttgacttcggaacctccttccgaacttcgtgttcgagtgaaagataaagggacagtgcttctcaattatatgttggggaaaagtttctttccggtcaatctaggttttcttgattataaaggaaaagataatcatgtgaaaatttatgcttccgactttgagaaaaaaatattaagccaactgaatgtatcctccaaaatcctatcgatcaagccggatacattagaatatatctattccgaaggaaagtccaagctggttcctgttcgttttcaggggaaagtgacagccggacttcaatattatgtatctgacaccatttgtaagccggactctgtattggtttatgctccggaaggaattttggatactataacaactgcatatactcaaaatataactttggagaatatatctgatacaacccggcgacgaattctgctgacttctgaaagaggagtgaagtttgttccggcttcggtagaaatgactttcccggtggatatttatacggagaaaacggtcgaagtgccattacatggagttaattttccggcagataaggtgttacgtacttttccttccaaagttcagattacttttcaagtgggcttaaaacggttccgcagtataaaagcaagcgattttatcatcaatatctcttatgaagaattgctgaagcttggctctgataaatatacggttaaattgaagtcgtttccaagtggaataaatcaaatacgtattgttcccgagcaagtggacttcctgatagaacaaattacttctaatggcgattaagattggcataaccggtggcattggtagtggaaaaagtgttgtttccaggctactcgaaataatgggaatacctgtctatatatcagatatagaagcaaagcgaattacacagacagatccggtgattcgccgggggctttgtgatctggttggtcaggatgtgtttcagggtggagagttgaatcgttctttgttggcttcttatatgttcggtcatcaggagcatgtgcggaaagtgaatgagattattcatccgcaagtgaaagaagatttccgtcaatgggctgcccggttgaaaagtgaactgctggtgggtatggagtctgcaatactggtggaggctggttttaaggatgaagttgattttctggttatggtatatgcgccgctggaagtgagagtggaacgtgctgtaaagcgggactgttcgtcaagagaactggtgatgaagcgtatcgaagctcaaatgagtgatgaagtaaagagaagccatgccgatttcgtgatagtgaatgatgatgaaacaccgttaattccacaggttttggagcttatttctttgctatctaaaaataatcattacctttgctccgcaaaaaataattaataaataaaaggatatatactatgttgaagactatcttgtctatctcaggtaaaccgggattatacaaacttatttcgcaaggaaaaaatatgttgattgttgaatcagtcaatgctgagaagaaacgtttccccgcttatggtaatgaaaaaattatttctttggccgatatagcaatgtatacggacgatgcagaagtgcctttgtatgatgtgctggaagctataaaagagaaagagaaatcagcgcaggcttctatcgacccgaaaaaggctactcctgaacaattgcgtgaatacttggctgaagtattaccaaactttgatcgtgaacgcgtatatgtagcagatatcaagaaattggtagcttggtataacatcttgatttctaatggaatcacagaatttaaaccggaaggtgaagttaaggaagaagcagctgcagaataatctgtaccgtttatttaatcaaaaatagagaacatgataagcattttaaatgcttatcatgttttttcgtataaacacttgtatgttcagaaaaaaattagtattatttgggtaatcttttactaaaataaatatcttctacttatattgtaaataatgatgcttttttatgtatctttgtcgctgttcactattcttgggaatagcagtagtgaacggtgaataacaatagagaacaaaagcgttataaagatattattcaagacttgagatctggacaatattgaactacttaggaataatgtttaaacgctcgtgttctgccatgtatgtaaatatgtggttgaacattagttgttttgcatgatttagctagtagatgtctaaagcgtcaagggggggataattgtagtaagttcccacgctttttatttttaatagccttctaggggagcagacggtttttgatatagggtatggagacaataacaaataaagaagtaaacgtccgtttggacaatgaaaaagggacattatgcctgacaggtttgttggcaggtacaatggtattcctttacgattcacagggagaattaaaaggcaaacataaatttgctttgccttcattgactatggaaatccctcaacagggtacctatgttttggtaatgagccatccgaattgccaaccggaagtccggagatttacatattcagggatataaataataccggtatgcttcttatcaagcataccggcattctatttaaatggaaactcttaatttctgaataccaatccgtctccaccagcgtcaacggtaattgctttgctgcggtcgacttcttgggaaagtaactttttggatagatcgttcaatagataacgttgaatagccctctttaccggacgagctccaaattctggatcatatcccacttgagataagaagtccaatgctccttccgtcagtttcagttccactccgttttcggcaagcattttctgaactcccttgatttgtaagagtacgatctgcttgatttccttttcattcaatggtaagaacatgatcgtttcatcaatacggttcaggaattccgggcgaatcgtctttttcaacatattcatgacttccttcttcgtttcttcaatcacttcttctttattggaaccgtgcaacttctccatctgactttgtatataagaactacccatattcgaagtcatgatgatgattgtatttttgaagttgaccacccttcctttattgtcagtcagtcgtccgtcatccaatacctgtaacaggatattgaaaacatccggatgagctttttctatctcgtcaaacaggacaacagagtaaggtttccgacgtatagcttctgtcagctgaccgccttcatcatatcctacgtatcccggaggcgctccgactaaacgggaaacactgtgcttttcctgatactcgctcatgtcgatacgagtcatcatcgtttcgtcatcgaacaggaattctgccaatgccttcgccagttcggtcttacctacaccggtggttccgaggaaaatgaacgagccaatcggacgtttcggatcctgtaatccggcacgactacggcgcacggcatctgccacggcttcaatcgcttcatcctgaccgattacacgttgatgaagttcctcttccaagtgcaatagtttatccttttcactttgcagcatcttgctgacaggaatacctgtccaacgggaaacaacatcggcaatgtcctcagcatctacctcttccttaatcatggctttatcgccttgcatatcacgtagctgcttttgagtatcttctatctctttgtccaaagcctgaagtttaccgtaacggatttcggctactttaccatagtcaccttcacgttcagctttttctgcttcaaatttaagattctctatctcaaccttattctgctggattttatccatcagtgttttttcactctgccatttggctttaaaggacttttcctgttctttaagttcggcaagctccttaccgatgatttccagtttcggtttatcgttttcacgtttaatagcttcccgttcgatttccagctgcttgattttgcgggagatttcatccagttcttcaggaacagaatctacctccatacgcagtttggctgcagcttcatccatcaggtcaatggctttatccggcaggaaacgatcggtaatataacggctactcaattcgacggctgcaatgatggcatcatctttgatacgcacatggtgatggttctcgtaacgctctttcagtccacgaaggatagaaatagtactcacgttgtccggttcatccacttgtacgatttggaaacgacgctccaaagctttgtccttttcgaagtacttttgatattcgtcgagggttgttgctccgatagaacgtaattctccacgagctaaggcaggttttagaatgtttgcagcatccatggcgccttcaccctttccggctcctaccagtgtatgaatctcatcaatgaacagaattatatcaccttctgatttcttcacttcattgacaactgatttcagtcgttcttcaaactcacctttatactttgcaccggcaaccagtgctcccatatccaatgaatagacctgtttgtttttcaggttttcaggtacatctcctcgaaggatacgatgtgccaagccttctacgattgctgtcttaccagttcccggttcaccgattagaatcggattattctttgtacggcggctcaatatctggagtacccggcggatttcttcatcacgtccaattacaggatccagttttccgctacgggcagcttcgttcaggttgatagcgtacttttccaatgattgataagtatcttcactagattgtgacgttactttttctcctttcctcaactcgctgatggcattgcgtaattctttttccgtcataccggcatctttcaagatagtggagacggtacttttcacagtcagcaatgctagtatgatatgctctaatgaaacaaactcatcgcccatttctttagaatactgtgttgctttctgcaatacttcgttagattcacgactcagatacggttctccgccggatacttttggcagggagtcgatctgtttgtcgacaacaagagctacctgctgtccgttcatgccaagtttctggaagatgaagttagtgacattttcacccaccttcattactccctgcatgatgtggacaggttcaatggcttgttgtccccggctttgtaccaggttcacggcctcctgtaccgcttcttgagatttgatggtaaaattgttaaagttcatatctttgttctcctttcttatttcacgtttttaataacacctaagagggcgcaaaagatttgccaagtataaaaatatgacaaaatagcatgagtattaaggagttaaaggacaaaatgacctttttatctgggagtaactgacgaatttgctataaaatatcatttgttacctgatacgcttgtttgtgtaatcttagcctgtgatgaaagaaaataaatattgaaaagtggataaataaaagtattgtagtatctttatccgctgtaataatatagatggtatatgagtgataagccccaaataaaacttgctgaagcagtggtgttgattgacgctgcttttttgaattttgtaataacagatataaaaggatattttgaagaaactttgcatcgttctttacaagagatagacctttcgatgttgaccacctatataaccttggatgcagggattacagaagggaagaacgaggtgcaatttctttttgtgtatgataaagaatccagtcgattgcaatattgccaaccttccgatttgcaggaagaattgaatggagttgcgtttcagagcccttatggtgaatattcttttgccagcgttccgtcggaaggaatggtgtcaagagaagatttgtttttggatttactctctatcgtttccgattcggcagacgtgaaaaggatgatcgttatttctttcaatgaggagtatggaaagaaagtgactgatgctttgcatgaagtgaaaggcaaagaggtcattcaattccgtatgaatgagcccgaacttccggtggattataaatgggatatgctggctttccctgtcatgcaggcgttggggataaaagcggaagaattgcaataactattgtgcttttattctttctgtaattcattattcgtcattgatttcttaactgttaatcataattgccgtgtccgattttcgtttaaaagtatttcagagcgtagcgaagaatctaagctttacgaaggcttcgcaagaattgtttgtcagtcaacctgctatcaccaaacatattcaggagctggagacttactatcaagctcgtttattcgaccgtcaagggagcaaaatctcactgactaaggccggagaattgctgctgaaacatagcgagaaaatcctggacgattataaacaattagaatatgagatgcatctgttgcataatgaatatatcggcgaactgaaattgggggccagtactacgattgcgcaatatgtacttcctcctctgttagcgaactttatagccaagtttccgcaaatcaatctttctttgattaatggaaattcccggggagtggaagctgccttgcaagagcatcggattgatttgggactggtcgaagggatcttccgcttacctaatctgaaatatactccatttttgcaagacgaactggttgccgtggtgcatacacagagtaaattagctgtcacggatgagattactccggaagatttgctgaatattcctttggttttgcgggagaggggctccggtacattagatgtgtttgaacgtgccttattgcaacataatctcaaactttcttcttttaatgtattgatgtatctcggtagtacagagagtatcaagctttttttggaacatacggactgtatgggaattgtttctatccgttcggtgcataaagagcttgtagctggcaatctccgtgtagtcgaaataaaaggaatgccgatgctgcgcgaatttaactttgtacagctgcaagggcaggagggaggattgtcacaggtgtttatgcgtttcgccggacatcatagtaaaagcctgtaagtttgtctttttctctcgtgcaatcgcttctccagaataagaaaaatgattttcatttctcatattctcataattattttataataatcttataaccagataattactgaatgggaaacgttttgagaaagcctatttctcatagtttctttagtgaaataggcctcaaaacagttatttctcatctattttcggggtatttctcatactgttatcctcttcgttcgactattttttctttatatataccctgtgtgctcctcttcctgtgatttctattccagaatccggttgatgtccccactgtcttagttcgttggttgctgctgtttgcaacaatcctgttagtttgcgatattcccaaacggtcaggaagggatgttcatccagatactttagagctaatgccagtcgttgttccgatgtgaatttattagaggatcgttgctttttccagggtgctctttccagttggcatctttcgctgatatttctcaccatttctcggtctacccggaaatttacacctcctataaaaatactttgtgcgttgcgatgactccccccttcttccggatcttcccgctccttgtctctgcctaaagtaagagagggagtaaacgttcctattccgtctatctttaccgagcgtccttctgccatcaaatgcgccatttcaatggcggtctgaagtagtacgccttctatgtctcctgcactgaatccactgacgtcacctactcgttgcgccaactcttttatgcttgtattatctatccgcgcaaatttaggataagtaattcttttgcctgttttctgaagatcgggcatctcctctatgatatatcttgccatatcatctattgtttaaagtattaatagataagttcttttgtattagaggcaaacttcctttcttctaatagtaaagttccttttgattaattataaactataaatgcaacttttgtttttataattgaagcttgcgtttataaaaacaaagctttcatttttataatcaaagcttgcatttatagtttactcttatacaaagataagttttctatttgacaaaaagaagtttatccttaataaagaagaagttttctattaatagtttgggagggaatgaagatgattaaagagaaaggatataacgggatttaatgcttaatatattatttcctaaaaagtggatgcaatgcttctgttagtttttagaaaagtgtatatttgtaatattatgagtcatactaatatcatgcaagctgaagaaaatgatttggtaaacattttatctttgcaaaagaaatcttttatggtggtggccgaacgaatgaataaattcgatcttccccctttgttgcaaaatcaggatgagatttgtgatgagtatcagacaggcattattctaaaatacgtatcagatgatggacagattgtaggttctgtcaggggacgtatggatgaaaatagagtatgtcatattggtaaattgatagtgcatcccgattttcagaataaaggtataggtagagaacttatgactgaaatagaacggttatttccccactgtcatacgttttctctttttacaggcgaagagacacccaatactttgcatctatatagcaaagtcggttataatattgtatgtagaaaagaaatggagggtatcagcatgattattatggaaaaagaaaaacttacttatagagattttacgtttgacgatttagaaactgtttgtaaattacctcgaaacaagcaggaactgttttttatgtttcctaaagctgattttcctttaacaatcgatcaattaaagaatacaataaaagatagatttgattcgactgttgttttatttaataatgaagtagtagggtttgcaaatttctatgaggtaagagaatctcaatattgtgctattggaaatgtaatagtaagtccttgttttcgtaatcgtggcgttggcacatttctgataaatgctatggaagatattgggaaaaagaaatataatgtatcggagcttcatttgtcttgttttgatgctaatacgagtgggcttctgttatatactaaattaggatataaaccctatgaaatagagaagtacattaataaggaaaacgaagtctcggctttaatagaattgaaaaaagtgctgtgattcgaaataaatcacttatttgattctgttatctcctgaaagtatgataacttaaaaaaatgcgagaagtatctatgactgactataacttacaacgatttttagatgcccagcgaggtgattatgaacaagcccttgcagaagttagaaacgggcggaaatattcccattggatttggtatatatttcctcaactgaaaggattgggcatgagttataattcacagtattatggccttagcggcaaagaagaggctgaagcatatcttgcccatccaattttgggagaaagacttcgtgaaataacgtctgtttttcttcatttgaaaaataaaacggcgcaggaagttttcggttcgttagatgcgatgaaagtattgtcatgcatgacgctttttaatgaagttgcttcggatgatttgtttcagcaagtgatcgaccattattatcagggtaaagtggatgagacaacaaaaagaaaattggaataataactaatactattttatatgtgctgtttaatgaatctattgtggttgctgcttggtggtatctttactgctgtcgaatacctcatttcgagtttattgatgatgctgaccattatcggcattccttttgggatgcaaacattgaagttggccggacttgctttatggcctttcggtaaagaagtcagaagtgggaaccgttccggtggctgcctctatatattgatgaatatcctgtggatatttctgggtggcatttggatctgtctgtcacatttggttttcggggctatattgtgcattaccattatcggaatcccttttggattgcaacacttcaagttggcatctttggcattatcgccttttgggaaagacattgtaacagtgtaagagtagttgggagagagtatgcctataattaaaagttataatgcataattagaaactattggtgggtcttgattgtttaccgtacctttgcacccggaaaacaattaaagataaaaagatatgatttcaacagctacaaaaactttgcaggcaaataataagatgatttatgttgcactgctttctactctgactttctttctttttttagactatattccgggattggaagcatggtcggcttgggtaactcctccggttgctttgttcctcggacttatttttgcattgacttgtggacaagcgcatcctaagtttaataagaaaacctctaaatatctgttgcaatattcagttgtaggattgggatttggtatgaatcttcattctgctttagcttccggtaaggaaggtatggagtttacagtcatttcagtgatcggaaccttggtaataggttggtttatcggacgtaagttgttcaagattgaccgtaatacagcttatcttatcagttcgggaactgctatctgtggtggtagtgccattgcggctgtgggaccggtattgaaagcgaaagatagtgaaatgtctgtagcattgggtactatctttatcttgaatgctatcgcacttttcattttccccgccattggtcatgcattaaatatggatcagcaacaattcggaacatgggcagctattgccattcatgacaccagttctgtagtaggtgcaggagctgcttatggtgaagaagcattgaaagtggcaaccactattaaactgacccgtgcgctttggattatcccgatggcttttgctacttcctttattttcaaaagcaaaggacaaaagataagtattccatggtttatcttcttcttcgtgttggcattggtagtaaacacttatttgctggatggagtaccacaattgggagcggctattaacggtattgcccgtaaaactctgacgattaccatgtttttcatcggtgcttctctttctattgatgtattgaaagcagttggaataaagcctttggttcaaggaattttgctttgggtaattatcagtttgagcacattggcatacatttacttcgtgtaagaaataaaagagagaattatataaaagagaaaaaggtgggagaatgatcgtagtaaacgactttctcccacctttcagttttagttcagttttagcctgctgataaagcagggctaaagcaaattatttcttcttcaattcttcgaagatcaatccttccagttcttcagccagttcaggattatccatgatgcattgtttggcggcatcacgtccttgtcctaacttagtatcattgtagctataccatgaaccgctcttcttgatgattcccaggtcagcacccaagtcgatgatttctccggaatgggagataccttcaccgaacatgatgtcaaattctgctttgcggaaaggaggtgctactttattcttcaccactttcaccttagtcagtttaccgagaatctcttcgccatctttgatcggctggctaccacggatatccaaacgtacagaagcgtagaacttcaaagcgttaccaccggttgttgtttccgggttaccgaacataacaccgatcttctcacgcaactggttgatgaaaatacaagtagtacgtgtcttgctcacagcagctgtcaacttacgaagagcctgcgacatcaaacgtgcctgaaggcctactttgttgtcacccatgtcgccttcgatttccgctttaggagtcagtgcggctacagagtcaataacgatgatgtcgatagcagaagaacgaatcagttgttccgcaatctccaacgcctgctctccgttatccggttgagagatataaagatcatcgatatttacgcccagtttagatgcgtagaaacggtcgaaagcgtgttcggcatcaataaaagcagcgataccgccggccttttgtgcttcagcaatggcgtggatagccaatgttgttttaccggaagactccgggccatagatttcgatgattctacctctagggtaacctccaacgccaagtgccacgttcagggcaatagagcctgtcgggatcacttctacttgttcaacactatcatcacccattttcatgatagaacctttaccgaagctcttttctatcttttccatggcagcctgtaaggcttttagtttttcgcttgatgccattttattatctgtttcaaaattaagttcgtctttttttgccataccttattcttatataattaatggagttattgatttaaaatctgtgaggcatgttctttggtcttcacttctttgggagtgataattcgttctacgattccctcttcatttatcaggaaagtagtgcggaaagtacccatgtaagcacgtccgtacagtttcttttctccccatactccaaattcttctactaactttttgtcagtgtcagcaatcagagtgaaaggaagattgttcttttcgatgaatttctggtgcgacttttcattgtctacgctgacaccgattacttcatagccggctttacgtagttcggaatagttgtcgcgcaggttacacgcttgtgcggtgcaacctgatgtactgtcctttgggtagaagtacaacacaattttttttcctttataagcacttaaacggatttcttcgcctttctcattgatacccaagacttccggtgctttatctcctacgtttatcataactttcttttaatgaataggtgtactcttataattccaaatccttgtcgaactcttcatgccagggaagaccttgcttattgagttgttccatgaacggatccggattgaattcttctacattgtttacacccggacgattccattcgcctttgaagaacatcatggctccaatcattgccggaactccggtggtgtagcttactccctgcataccggtttcctgataagcttcctggtgactacagttgttgtatacatagtaagtacgttccttaccgtctttcagaccacggatacggcaaccgatagaagtttctccttcgtagttttctcctaaatcctgcgggttaggcaatacagccttcaagaattgcaatggtacaatcttcattccgttgtaatcaacctcgtcgattcgtgccataccaatgttttggataacgcgtaaatgagttaaatactcctgtccgaaagtcatccagaaacgtgcacgtttgatagtcggataatgtttcactaaagattccagttcttcgtgataaagaagataagagtcacgcggaccgatgttcgggtatgtaaggtctttgtggatttccagcggaccggtagttacccatttgccattttcataatagcgtccgttctgcgtaatttcgcgaatgttgatctccggattgaagtttgtagcaaaagccttatgatggttacctgcattgcagtctacaatgtccagatattgaatctcatcaaaataatgtttagctgcataagcagtatagataccgcttactcccgggtcgaatccgcagccgaggatagctgtcagacctgcttctttgaaacgatcgtgataagcccactgccagctgtattcaaaatgagcttcatctttcggctcatagttggcggtgtccagatagttcactccggctttcagacaagcttccataatcgtcagatcctgataagggagagccacattaatcaccatttcgggtttgaaatcgttgaataaggctaccagctcctctacattgtctgcgtcaactttagctgtttttatattggggttacctattgcctcgacgattttatcgcatttctctttcgtacgactggcaatcatgatatctgtaaatacatcggcattttgtgccactttgtgtgcaacgacagtgccaacaccgcctgcaccaataataagaactctacccatttctgtatttaatgaattataatttatgatttattggtttggcaaatatacgtgattattttcagataatcattgcgcagctactcctttttatttgtaacgttgcaaggttccgttttcgaattccagcgttttgccattgtagaaccaagtttcgaaacgactgtcttttttcagctcgatttctatcggatcaccaatggacaaacgacattctaccgtactcatccctgcctccaaatctccccgggagataatctgccaacgtttttctgtaatgcccggatatttcttatgtatatcctcgaatccgaaaaaatcttcgatataattatcatttttgacaatcacgtcatatttcagatctgtttccaattcatagattgccccgtccctgtccgttaatgacagggtggccaggctgccgggggagataatttaatctcttttatttgcagaaccgtatatcggggcaagtgaacacgtgattcggtctgcttatcttcaaaagatacgattcttttggccggcagcatctttttaggataaacggtcattcccaagtatttatttttcaggctttcaatagtacccagactcttgttagtgaaactgaatgcatttgaaaaatatttcattctcttttcgccttgaaaatcattcaggtccatgccggagttcgttcgcgagagagcgacttccagataataagaatgtccctgtgtatctttgaatacgattttcactggatatgcctgactgccgactccaatagcggtaattgtagcttccgtattgacaggaattgctatatcccgatagccggaataattgttggcatcgtctacccgggcactttcagattgtatatagactgtttttcctactaacaactctttggcagtatctacatctttcagataaaccaatccattgataccggcacggggagccttctcgcaaatctcgtccagtctcatgttctttatgtcataataatatttttctccctcacattcgaatacgaagcgagtggaatagttggttccggttgatatattttgagccttctcttctgttcccgtgaaagtgagaatcttgtgcttcagcaggctgttgtctattcctttgtcggtgtcgtagctggaaagagtaggaaggaacatgttccgtgtagaaggaacaaacataaacttcattccgggtgtccatttacacagcggttgcagtggaaagttattcttgatgaattgttcttcttcacctacagggatttcctgcgtggaaggagtagtgacaatgtaatcactttgagctgtgataggacacgtgccataacagaatagaattaaagataggacaattattctcatatttgtttactttaagtgaactatgtaaattgttcgtttgttgtatatctactggcaaatgtatatattttatgttgtattggatgttattttccaatctttttgatatctttgcccccgattttaacttaaacgttataacaatatgaagaaagtatttgtttcaatttgcattgctggtgcagcacttgcaatgtcttcgtgccgttcggttgagaaggcaatccctctgtcatctatcaatggtgaatggaatattatagaagtcaacggctcgaaaattgctccgggcgaaagtagaacccttccttttatcgcttttgatacagcgaccggtcgtgtgtccggcaatagcggatgtaatcgtatgatgggtagtttcgatgtaaatgcgaagccgggaagccttgaacttacagggatggctagtacccgaatgatgtgtccggatatgactactgaaaataatgtattgaatgcttttgcgcaagtaaaaggatacaagaaggcaggtaaagataagatgtatctttgcaattcgtccaaccgtccggttgtcgttctacaaaagaaggaggctgatgtgaaactttcagttttgaatggagaatggaaaattaaagaagtgaatggtgaagcaattccttccggtatggaaaaacaacctttcattgcttttgatgtgaagaaaaagaccattcatggcaatgccggatgtaatttgattaatggcggttttgaaaccagtaccagcaatgccaaatcaatttcttttccgggagtagcgagcacaatgatggcttgtccggacatggaaacagaaggtaaggtgctgaaagctatcaatgaggtgaagtcattcgatgtgttgtccggtggcggcattggcttgtatgatgcaaatggcgcattggtcatcgtgctggaaaagtaataaatagatcaatctatataataggatatgcctgtgtcgcacatgacgacacaggcatattttttttctttcatcgaaccagagtcgtctgtatttgtttaaagaaacagttgctgactggctttgaatatgactatgtcagcagtgtttatttattaaaactgtctttttggcagatattatgtcatgcattcgtataatttctttttggcacacggtttgctttttagtaagcgtccgttcgcgacgaggctccttgataagagccggagaaacaaccggacaaaaagaaatcaatgaataaataataaataaaaaaataacgatcatgggaaaaattattggtattgacttaggaactacaaactcttgtgttgccgtattcgaaggtaacgaacctgtagtaattgcaaacagtgaaggtaaacgtacgactccttctgttgtcgctttcgtagatggcggtgaacgtaaggtgggtgatcctgcaaaacgtcaggctattacgaaccctacacgtacaatcttctctatcaaacgtttcatgggtgaaacttgggatcaggtacagaaggaggtgactcgtgttccttataaagtagtgaaaggtgacaataacactccgcgtgttgacatcgacggacgtctgtacactccgcaggaaatctctgctatgattcttcagaaaatgaagaagactgccgaagactatctcggacaggaagtaacagaagcagtaatcaccgttcctgcatatttttccgactctcaacgtcaggctactaaggaagccggacagattgccggtctggaagtaaaacgtattgtaaacgaaccgacagccgcagctcttgcttacggtctggataaggctcacaaagatatgaagattgctgtattcgaccttggtggtggtacattcgatatctctatcctcgaatttggtggtggtgtgtttgaagtactttctacaaacggtgatactcacttgggtggtgatgacttcgatcaggtaatcatcaactggttagtacaggaattcaagaacgacgaaggtgctgacttgactcaggatccgatggctttgcaacgtctgaaagaagctgctgaaaaagctaagattgagctttcttcttctacaagtacagaaatcaacttgccgtatatcatgccggtaggtggtgtgcctaagcacttagtgaagactttgactcgtgcaaaattcgaatctttggctcacgaattgattcaggcttgtcttgaaccatgtaagaaggcaatgagtgatgcaggtttgaacaatgctgatattgatgaagtaatccttgttggtggttcttcacgtattccggctgttcagaaattggtagaggatttctttggcaaggctccttctaaaggtgtgaatccggatgaagtagtagcaattggtgctgctgtacaaggtgctgtgttgacagacgaaatcaaaggtgtagtattgttggatgttactccgttgtcaatgggtatcgaaacactgggtggtgtaatgactaagttgatcgacgctaacactaccatcccggctcgtaagagtgaaacattctctactgctgccgataaccagacggaagttactatccacgtattacagggagaacgtccgatggctgcacagaacaaatcaatcggtcagttcaacttgacaggtattgctccggctcgtcgtggtgttcctcaaattgaggttacatttgatatcgatgccaacggtatcttgaaagtatctgcaaaagataaggctaccggtaaagaacaggctatccgtattgaagcatccagcggtttgagcaaggaagaaatcgaaaagatgaaggctgaagctgaagctaatgctgaagcagataagaaagaacgtgaaaagatcgacaagctgaaccaggctgacagcgtaatcttctctactgaaaatcagttgaaggaattaggtgataagttgcctgctgataagaaagctccgattgaagctgctttgcagaaattgaaagatgctcacaaggcacaagatttggctgctattgatactgctatggcagaaatcaatactgctttccaggctgcaagtgctgaaatgtatgcacagagcggtgcgcaaggtggagcacaggctggtcctgatatgaatggtggtgctggccagcaagataacagcaagcacggagataacgttcaggatgctgacttcgaggaagtccactaatatctataagtaaactactaatagtatgtaatataaaaagcggtaaatcattgatttaccgcttttgtttttatgtttttcctctgtttattatgttatatttatatatgtttgcattatatttgccacattgttgtcacgcgctttattatgtgaaaatatgatttttaattaacatctttatctatattaaattttaatactcactttgttgtctttctgggtaatattgaatagtctatctctgcacgaattgtatctttacttgcgtttttttacaataaatatgattgactggtagatgcttgtccggttttattatccattccttaatttcaaaggggtacaataataagtagcgaaaataaagtaagagtcacagatttcatggctcttactttattttatttattctattcttcttccaaattgagccctaattgcattgccgattcctttactactttgtaaatttgtgccgattcatccaatggatttaaacttgtggttttagccttaaaagagatttctatttccaaaccattatttttgagaggaacaacaaagctggagaataaatcagtccaacgctcaaccggtacttttccagagactttgatggatttaaatttccgtaactcgtctacaggttgggagggggctgtatgctccgatttttctcctgtgggtgaattccaagcacttgactgttcatcggtagaactttcttcagattttggttgattattaatagatttgtccactaaccaatattgcggatcggtaacatctaagaatggaacagattcatgatgataaatgtgattgtagtttccttgttcaccacaagctacattaaaatcaccattctcgcaatacctttgaatacttttgctgacagtttccactccacaaatcatgggtttgtcatcaaagcgtagaaaggcctcatataagtcgttaacttgtatgggttgctctattgtagggtataagccactgctgcgtaaagttccgaggccaattgacttttcaagcagccattcttcttcttttatattgttaaaaaggttgctacttagttgcgtgttaaaatcttgtgcaaaatctttaatctcgattttctctatcccctcgctaacagagtatttacatacaatattataagctgcaataagtaaagcatttgcttgtttatcgtactcggctttacgctctaaaatatctttcttctgttctggttctatctgcccgctatattcagcttgtattttcgcacaagccaaatactcaagtagcttactatgtagcatacctagacctatttcagaacatgccaaatataatatagtatttctgtatattcgactactataacctttattttgggctatttgctcaacttgctttttggttttggtatttatacttcctggttgtgttgcatactcaggaccgagtatcaccaatgtaagacttttttgttcaggaatatcattggctggattaaccagtaccttgatttttgatacattacgggtttgtgcatttagtcgattaataatttctcccgaaatatccgcttgacttatttcagctttagcctgatttaccaaaatattgatattaggtttggattgaaaccaataactgcgtgaaccaacattggtggaatagagataatgagctacttgttccaatttgtttaatgcactatttacttcactatgattaaatgcactaggtttcaaaatacatagttttagttcctcaatagtcaatcctttgttttgcaagttacccaatgaagccattaatatggtagtggctataccttgggtcaagttatatttgccgatattgttgttaggatcttcattgtctattttataagcattgcttgaggtacctatgacatcggcatgaatcactgtttcccactgacttcccatcaagctggttatagtacctgttaatgttggcagattactaaggttgacatccgaggtatggattaatgcctgggtaccagttaatgatccccgtcgtgtccacaaatccttcacgatggatgctaataatcgtaatactccacgcgtacgctggaaacgagaatcctgtccccattttaaacgaaacatatcaatcaattccggatggaagggataagatttgcgcatcttgttaatatattccatgcggtcggcttgattgggtaaatcggaacgccgattatgatatgtattcttgtaacggtttaaaacaagctctatcacttgcggattcccaatattgtcgaataaacgacggcgaacgacttcaaatatttcttcatcttcgacgggttttatacttgttccaactcggacaatacggttttctaaagcagtcagtatctgttgaccgatggccgatgaagcaacttccgttgcgctagcgggtaatgtggcaattaatacgcagcgaggtacagaagataccacttcagtcagtgtttgcataaaaccaatagtctgatcggatagacttccttttcctatcatgactgccgatgctttattacaatagtctgctaactcatcaattagtataagagcaggggctgacttttccaaaataggtcgaaataaattggctgccggtgaaatccgttctatgtcattctttttaattaagttgtatccttctaaacctcctaattgataagccagttctccccataaggtataaatagtgattccatcatcggtggttctgccttgtgatacatcagtggtgttattggtaaacactgccacttgcgcattctcaaactgaggggctactttactatctaaaatatgttgagtataggctgaagagagcagagattttccagtttttgtaatgtggtataaagagatcaacgtatgtgttttaccacctccgaatcctgtctgcagggagattactcgattatcggtttcttcgccgttcaacgcacgaacaactcggttggctatatcgcgcaatccggctgtgatataggttttttcaaagaacatggtcgggttgctatacacttcttgtccgatgcccatagccacttcactaaggtttgctgcaaaaacagattcatccagtgagccgttgcggatatcataatggggatatacattcgtataccaggccggtagaggggagtcttcggagaaagaaactgtagaagaagcttctgtagtgacaggtgtctctatttgaatagtcggttcattttctctattttttattgtatctatttctgttactaaatcaggcatctgaagtaatttggctactagtttcatagtgccaaaagctctgtctatctcgtcttcatccaatggctgatagtgattgcatttattacgtacttcctgtatctcttgcagatagctgataagtttatttgcttctttgctatttcccaattcatcggttagctcttgtttaaaggcaatggcaaagcttgatagattgctataatctaccagttgcttacggtcactatctgcggatagcgactgaacagctttattccaggtgttttgtttgtccggtttaagccgtgcaaagaatatgccttcccaaggctcatccttaaatttctccagtaagaaacccacgacgaacggacgcatggcttcaataaaaatactgagtgctttggataaattatcattcataatcattctgtatttattaaaatcctaaattcatttgtgtagcttgaccggttatatccttctggcaagactgaattagttcctcactattagcaagtagctcatttacttgtttaaggtcatctccatcggggagtaactcttttagggaggccaatacacgccaaaaactattgttagcttcagaacctaccagcttaataagacgcaatagtttaggacgattttctttagaccatagcatcatagcctgttgaacttggtctatcaatggatcattgatgttagtaccttgtatttcgcccgtgattcgttctgtgtaggaagctaaatgctgcttattcccatctttaataagtaaatgatgatggaatatgtcgctaacatctatattcattccgatgcgtgtgaattttgcagcatcatcaaaatctgtttcttccataccgttcatttgcaaccagccaatgtagaatttggtatattcatctccttcaaaacctctgagcaaagcattgaaagctgctgtttttgctagttctaaaagttccgttacagttacttcgcttccatcagctttttctactttttcatatttgccaaattcacttactgcttgtccaaagcaagctgttaatagatcggcgccgcggaaacctaacccataaagtttttctacctctttattaactttttcttcaatggctcgtttcacttgtttgaagctgccataaccagaacgttcggaggggcgacaggaaacggttacagaagattcaagtgcggcacttgccagtcccaaacttctatttgccatttcagtatccataggccagctgcctgttatgttcatgcgggcacttagaatagaattacacaacgtggtccatgcttctgttgtttggtgagcaaacattatactgactatatcagacgtttgttgttctattgcatcaaatatatctgtgagcttcttttcaaagtataatttagcttcttgttcgctattgttatgatgatgttttagcgcagtacactcctctgatttaggtgtttgcggtgttgaaaagtttaatggatatgtatcatttaatgttcgctttagccaaacgtagaaaaaatctgatatatcagcatacgcaatcgcatcataatatggaggatctgtaaccacagcagtcagctgtttacctccaaattggcttctttctccacttgatgcattttttaaattagtacaaaaagaagaattactttctgattctatatatcgcagtatccattcaagttggtttgttgcgctgccagaactactacagaaaggattggattccggataatcgaaaaccatggcaatagcttgtctgctgaatggatgttcaatagtttcacggccattatgccatcttcccaatgaagtattagctacagcaattcgatcaatccagattgctaggtaagtgtaaagagcttgagtatattgtgtcagctctattctcttttttaaaagagagaagctttttgtaaatgattggagcataaatagctgacggtcagagaacatgtctccataaatttctattccccatcctggagtattgaaatttctattattttcaacagccattctatctgtaggcttatctatattttcagattgtggcttaatgtattcatttttacttgatgatgtatacagctttccactatttgtttcagaaatgattgctaataaaacttctttagatgtttttaccttaaactgttgtttaacctgatttacagctgtaatgcttccacagcaagggcaagtcatgtttccccgattattccatccttcttttattgaacaaactccttccttaatctcaaattgaatatctgtcccattaatgataggattcaaatacaccttcttcgatgaagtattcaccaaatagaattgtttcaacaagggcacttctgctttgcagcttggattagagcaagtagcagttcttgcccaatagtaggcgattggtttgttcccattttcatcagcaggatataaatgtcctacctctttctctgtcatagccaacaattgtttggcatagtattccacatcaaaagaaagtctgttgggaatatctataatgccgttgctaatagaaattcccttggcaatgagtatatctataccctctttcccgtaaatacgacgaaattcctcttctgtatatcgtatgggcttaccatatttttgcggaaactctacacttcctttttcaatgatatgggcaaccggattaatatcattgccatagctgcgacatcccaaacgtgctgcctctaaaggtatagcacctccacccgcaaatggatcaaacacacttggcatctgtttttgaaaacaatcaattgcagtttgtagcgcagtctccttttcttttatgatatcagtttctaaatgacggtctatacaactatagagattgttttcagcttcttcaatagcttgataggcagcatcaaatgattgacttaacgaaataaaagaagcattaggattctgtcctgcattgtatgcaacccagattaactttcttgcttttgtcaaaacaaccttatcattcttactttcccattttatcaggcaaccttcacttaactgctctttcgaagctgtatttttgcctttcaacatattagcttgacagactggagaaaacttgcctataaacatcagcaaacgattgcgcagattgtccggcattggatcgtatatggcagtatatggaatatccggataaggtgcataaagtggatcgtttcctaacaactcctgtatagcatctttaaaagcctgcggacattgttcatctaatgggtctggtaccagactggcaaagattacagccctgcacacaggaagtggacggcgtgcccaccataaatgtaaagtagaaatgtgcccgtgacgaatagatttatcacgtacactttcagccgatatttctttaatcggcatagctacctctattagcttttttgcttttgtcatatctatgttttcttatttttcagttttatttctccattcatccagtggcaggtagtattgtactcctttatctttccgttcaaagatgagcttcttggctgggttttgaatacggtgcaattgtggcttagatttgcaattcactacaatataaagccatgcactgtttcctagttgtgccaaccggttcatttcattctccgacagcataactccatcgattcctgaacgccctttgacctcaatataccgtttaatatccaacttgttgatgctccggatatcatatcctaagttttggctggaaacatcttccgcttgccattcattggcagcctcatactcgatagccatgtttatagctatggcttctacttcatcgtctcttttcataccataatgttgctcatactccatttggctgagggggacgacataagcacatcccaatatttccggagctttgggatttatctgaaccatttgctccatttcgcgtatgcgttcatcttttttgcggagtagttctgcttttcgttccatcttatgcagcagcttttcctgtatttttatgtctcccaataacaccttaccttgcaattcattaatttcaatgtccagatccatgataatctgactgaatgcagtctgcagatattctttccgctttgcagcatctgattctacaatctcttgcgtagaggtgaacagaggtaaagtgatattctcgaatgcccattcggtgacttcttcattacctataagagcaggaggagtgatttgtttggcaaattgaagaggggcatgcagatccagaaacttggctggtgaagttacatgaaacactccattattattttgataaacaaaactaagttgttcatttgctatactgtcatctcctttgttgggacggttgtctgtaatttgatttttaacgtaaaaagcaaaatagtcttcagtatcttctggtgaaacaagaatcgtacctttcagcatttcgtctctgaaagaatcgcgtacacaatcaatgagtgcatcaaacaaagcgttacccggattgatatagtgtaccttacccaatatggcattggtgttctgatagtccaggaatatgtgcttatcgaagcagaacaataatttattgatattttcagcatagatattataatcatcttttagacgtttggaaagtacatccggaatgttttccatttgataaattccgtcctgtatcatcctatatttgccatctaagtagctgaaagtcctttcaaaaaacagatgaatataaatcggttgcaatcgtttctcgtcagaatgttctttgaggatacgggcatctttataatcgacttcactatgggcgattactttttgttgttcttctatcttattccgaaatactttctcaatgatggtttcatcctgctctataaacttatcaaaggaagattcttttccatcaaagacggaagctataatagcatccagactaacatccttcagtacatcttgaataacatcataaacgcggtcatcacccatgctttgacgaataatatccaactttatcagtaaacgggacaatacttgtccttcccgagtgttgtccgccaccatattgaataccagtacatcatttttttgtccatagcggtggatacgtcccatgcgttgttctaagcgattagggttccatgggatatcccaatttattagcaatctacaaaattgaagattgataccttcgccggcagcatcagttgcaatgagtatttgggtttcaggagacatgaaatcccattgtgcctggcggcgttcatcaaccgataagcctccatgaatgactgctactttatagccgttgttgcttaaacgttctctcaaatagagcaatgtgtccttgtgctctgtgaaaataaccagtttttcaccattgataactccctgacttttcaagagctcttttagctcaatgtatttcttttcttcttgattttgattgtacaggttgttcgccatctcataaagacgtttcacttcttgagcttcggtctgtatctctgctaaactttttgaagtggtgaacagtttgaattttcgagggtcagataggataccatccaacgcatcccgttcatcgtcttccaggtcatcgtattggtcgatgctatccacatccagttcttctaacttctgacgttgtttccatatgttaggattcttgcctacttcatccactatgccttgtaacgcaatccaacgtttgtataatgtgtttttgatggcaaaaatagaactgactaatcgtcgttgcattacagccaaagccaaagatacatgaatgttccttgtttcggctgcttcttctttctgcttggtcagatagttggtaacattgtcatagagtcgcttctcttctggtgtcaattgaaaagatactgttctggtatatcgatccttgtatagattgttgccattccagtctttcatgtcctcctttaatcggcgtatgaaaaacttattcagcccatctttacttaattcttttactctgtcggcagcaatatcctctgttgcaaagatatcttcgtctaataattgaagaagttttttgaacgtatcagttcttcctctatgtggggtagctgtcaacagcaagatgtgttcacattgttgagaaagtaagtgtgcagcttcatatcgctttgacttatatgttttttgcccatattcataagccgatagcttatgagcttcatcaaagatgactatatcccagtttgtattgctgacaatgttcaacacatcctcccgacaaatgaaatcaatagaagctaccactttatttgccgagcgaaaaatggtagggtcagcattaaaaatacttctattgacaagcgtaaacggaatattaaattttactcccatttcatcttcttgccattgtttggtcaggccgcctggggtgataataagtatacgctcaatgatctttcgcattaatagttccttcaataataagcctgccataattgtttttcctgcacctgtatcatctgccagcagaaaacgtatcttaggttggggaagcaaaaatttgtatacggcttctacttggtggggtagtggatctacaacactacaattgatggcaaatagaggatcaaattgataagcggaatttattctttctgcttctgcaaataatacaaatttatcgggatcgcccttgaaattgaactctccatcagatgtcaatacttctaaagaactgaactgttcttctgtaatcaccttggaactgcttttattcgtatttactcctgtaaatttgagcgaatacatagttcctaatttctgtattttgttaacaacaacagcttctgttggtattagattctttattatattgccgacttcaatcattgttagaggattttataagatcttttacgtccatttgaaggacttctgctatctgaaataagacttccaaactggtctgtcttctattgcaaacataagaattgacaatacagaaactttttccagtttttttgccagctaggtttgtttgataccttttcttcaaatactttttttatccgattcatggttttgtccattacaaaattcttaattgttaaacaaagatataaaacaatctgctataaaaagagaaaagaggatgattatttctcttgggagggtaaaaaagaggtgtaaagtgtctacttaatatccttgtttcatggtatcacaggtctgatatactatctatttggattagaaaactctttatacgaaaatgacgatatgctcagctacaaagtgcaatatccatctaatagatggaggcacttcgatgttgaaagctgtgacagatgagtagagaattagccgcgaactgacgaataaggaaatgaatacataaagacacaatgaaacaatgaactgacggacagggagaattaacaacgggtggctttgccagttaatcagattgtagtgtcaaaataggtagagatgaattataatcagggaatggaacaaagaatagccacatttactttttttatataacttgggtgtaacagaatttattgaaggaagaccctcgggtgttacttgcgtctcaaatgcatcctatcagtgtctttctaagatatttatttccatgtattacctttcgggatttaattttattggcactttcttcattacgagcttaaatccctgctaagagactaatgcggaagccgtgagagacgatttcatatccactttgcgttctacaataatagtagtagctgaccactgtttgccctaggggattgtttgtgagttattttgaaaggtacttattgctaagctcattcattttcaataggcattctaccttgtgtatttttgctgaatcgatttccatcttcaactgccgtattacatccacacccgtttcattgacaattccgattagtgcatcttttataatatccggtccaacacggttaagagtacgtctatgtatctgctctaataatacttcggggctgtcacgccattaagtatacactccaatgcatttttataactttttgaatctgttattacaccattgtagacagacattcaacttgggaaatttatagacaaattttttgtttaagtcgaatatccgacggtcatactgacaaaggtgctgaattcccgttactcttcctgccaggaaatagtttaatataataggaattctctaactttagtgaaaaataattttcatgaactcgccaaataggtatccgatagactctggtactttgttattgcaacttcgcctattgcattttcaattaataaattgcgaaatttgtctaatttactagttaagataccaaacttctcttgaattttatctccattctcacctaatatgcacacaaaaacactatcattgtgaacttcaaccacaatttttctcatgggacataagatttatggcatagatcacggtaaataaaaaagtatttgtggctcacacactgagaccacttcaccaacaaggatgagagtagtcttgttttttatctaagcttaggaacaggattcaattataaaactcgcatcttgtagtttcccactttacacaaaatagtggacggcgtaagatataagataattatagctgaatcctgtttcttatttatataatattttgagcacttcctattaaacaaaactgtatggtgaactttttgtcgtcattatcttccctaaaagtatttctactttaccttttttgttaattcatttaattgttcttgagctttatatatttccaaacgttccttgagaaattaaaaaattgaagggtgaacggagaactcgtttatcttattccaaccatcccccagcgagtatatcagttcgttgacaaaagcctcgtcaggggttatgtcgctgagtatttctcgcacatacactttgtggttaatagaatgaaaattaccctttgtatttggaccagcgcaatacttccacaacttcgcatcctgtttccagtaatgtacattaacgcatgcagccaatgtttcctcgctgcgacctgcagttctgaagtcttgccctttcttgatattatacttactagttacaagtcgcatcagtttccgggtaagtttctcttccggtggagcttccttacctagtttcttaatgtctgaatagaacaagtcatgggacacattatctgcatattcgcgaatacgctgcttgcatagtaccttcgactcattgctttgcaccatatccataaggtcatggtatacctcaactggtacttgtacattctttaatctcacgagtgcctggtgtatttcctccatttcagggaatacaaactcacaagtgtcataaatgttgtatgtgataccatccttctcaatacaatagataaagttctcgttatatcccttcttaaatgcaggaatatgatattcgtgcgattcaaaattctctcccaaaactgtaatcacgccatcgtgagccaatcgaggttctccaaccttgtaagctatcgatccgtctttggctatggtaagttgtgcaaagtaatacagattatttttctttttctctgcatacgtgatgacgcatcctttgaaacgttctatcatatactgaggcagtgcctctcttatacaatagtccttaatcagtatctgacggaagatattcttgatagtggccgcctcaatctcagatttaatcatcacatcttgggtaggaattttcttttctatcagttccattttctctttcaaatgtctataatccaaagtttggtgttcgctatcagaaagtttttcctcctggtctttgtcaccaacgatacgaatgcagatttgttttctacgcttgtccttctcatgccaaccttcaaagctattgccaaacagctttttgatgtactcccttgatttctgctctatcaaatttcgtaacttttctacacctgtttcggtggtatgacaggctatctcaatccatgaggtagagagcatatcacgcaacagttcatcttctttcctgaactctgcatcctgtgctttcaataatgtaggctttttgtactctattggattaacagacacgtacttcaaataggttgtaagaaagtcctgcagcacacttcgaataagataagcctgcgattcctcaaagtgttctatatcactgaatcctaggaaaggtatgtggttcttgttaccttttctaaaaacagacggatggttatagtattccttcgttcccttctttttcttggaagaaaaatagattcgtttttcatcaaactccaaatgatataccggagaatctttcttgttattcttttttaccttatcttcctcggcaaaagtcaatgtgcgcgcagtcaagagattatcgtaatcgaaactaatatgcaggcccaactcctcacccgcacttctccctttattatatatgctactgcaagtgccacaaattagtttaccatgggcatagctcaaggttttattacgatttggaatcattgacaacaataggtttagcatattgttagtatggataccttcatcgtaagcaggacgataggtaatctgtttaattttgacattaactttcttcagacattcctgcagcagtgccattgtgagtttctccttctttccaccctgaaccgcttgtactcgtcgagtgtcagccgcaatgtcttggagtcgagcgccatcgtgaccgaatccacccgcatgtgcttcacctccgaaagcagcgcgtactattcgattggtaacggtcccgttccgtcctcagccgcacggcatgactgtgttgcaaccatacgacaccaccgagaatcacgacagcagccaacgggcattttaccggaattctattcataggtcatcgtattctcagggataaaccatagaaaatcatccaaatatgcctcctttaatagcaccagcgcaccgcggtttttcttccttctggaagcgaggtcttccacgaccaatccgtgccggtccgccagttcgtcgagtctcaactcggaaagctccgccgagactacgtttcacgtttattggggggcaatgtatcaataatattcattcggagtatctgtaaaaatgttatatgccggatatgggttcggtatacttcgcctgagaggttctttttgcagaagtagttttttgagtataatggtaaatatattaattattagatactatatttggatttaagcgttaatatatttacttttgtgctatgatgacaaattctataacccgggcgatgtccaatccggagattattgcggagttgggcagaagattcaaggaatacaggctggctggcaagctcacccaaaaagaggccgccgagcaggccggtgtaagccttgttactttacggcagtttgagaatggaaatgcctgtaacatcaacatgggtaattttcttgcactcctacgggtagcggactgtctggaacaaatggatgagctgttgccagaaatacctgtttcggcatacgtgctggaagaaatgaagagtaaaaaaccgaaaagggtgagacatggaaaataatattgtgaatgttatgctatggggtgaagaggtagggaagctttattgggacgaaaggaacagaagggccatcttcaactatcatccggatttcgtaaagaaaggcttggaaatagctccgctgaccgcttctgtcaagggtggggcagcaaaaggtatgcctatatccggcaataaggataaactctatcagggattgccgccgtttctggcagactctttgcctgaccggtggggaaatatggtttttgaccggtgggccgcgcagaaccgtatcccgaaacgtatgctcactccggtagataagctctctttcatcgggaaacgagggatgggggcttttgagttcgttccagccactcccggactggaatcttcttctgctcttcagatagacagtttgtaccaactgtcacgccgtatttttgaagaacgggaagaggtgtcggtgcaagaagacgagacgttgcatctgcaaagtatctatgaggtaggaacttctgccgggggacagcacccgaaagccattatcgccattcatgaaaccacacatgatatacgttcgggccaggtgcccttgcccgaaggctatacttattacatcctgaaattttcggaaggagaagattttccttttacacaaatggaaatggcgtactatgagatggcaaaggaagccggagtgaccatgatgccctcgcggcttattgagatagaggggaaatatcactttctgacggaacgctatgacaggataaacggggagaaagtacacactcagacgcttgctgcgatgaatcccgatgcaacaagttatgaagatttgttcgaagtgtgccggaggctgaatattccggccagtgagcaatcggaactctaccgccggatggtattcaatgtaatgggtggtaatgtggatgaccacatcaagaatttttctttcctgatggagaaagacgggaaatggcatattactccggcatacgatgtaacatttaccactaatttggacggtgcagcatacgaaaacatacactgtatgagtattgccggaaagaatgatgaaatagtagaagatgacctgctacagtttgcgaagctgaacggtataaagaatgcaaaaaagataatagatgaagtgggtattgccatcggccatttctatgatcatgcctctgacctgcagatagacgactactggaagaaccgtatagagcaatatctttcgagcttagtgcctctggagataggagaggctatgaggcattatttgcctacacttgtagagccgtatgaaacagaagacaacctacaggtatcggaggttaacatcatagagaatactcggcatgacttccgcatagaagcaatgattaacggaaaacggcaaaaatatattgccggtcgtaaaagtgatttggccgctgaaatcatagctaagggcagaaacaagatgcctacggaggataagaaagcacttgtggaacggctgttgctgcctttggcaagaagggatagtgagaaaacaaatagcaatagcaggagatagactgttgtgaaccgttggatacgtgagccagcggtttttatatggggggagtagtaggtttggaatgtagccagtaggtaactggctttttttgtatattgtatacaggtaaaacattatgaattcatggaatttgagggactaaaacaagatggatacatttattgcaaaacaaactttgtacaatagcaggagtacattctgtaaaattgagatgcttgcggctatcaatggttcaaaaataaaatatttataattttttaaacagagaaaacgctgttctgtttctatgaatttacatctgattatcaaattattaacttaataatagtagatatgaaaagaaagctgtaagaacatgcaatgactccaaacgttttatatggtatttattacgtatgtcgcctgagtatgaatattgtacgtaaacctattgtagaagaaggtgtgttttcggaaacagaactaggtatcatcggttcctgcctcttctttgtctacgccgtaggaaagttgacaaatggttttctggctgaccgtagtaatgtaaggcgcttcatgtcaaccgacctgctctgttctgccttaattcatttgctattggggtttacaaactctttttatgccttcgtccttctttggggattgaatggatggtttcagtcaatgggggctgcatcgggagttgtttccttgagtcgctggtacaacagcaaagaatgcggaacctattatggcttctggtcggccagccataacatcggtgaggcttttactttcatgacaatcgccttgattgtaggttggatgggatggaggtatggaatgattggtgcaggggagatcggcttgcttgggttcctgatgatgattacctttatgagggatactcctcaaagccaggggttcttgttgggcaacgaggcacccgctcccaatggtaatgccaagaaacagtaggaagaatttagtcgtgcccagaaagcggtacttcgtaatcctgccatttggatattggcacttagcagtgctttcatgtatatcagccgatatgccgtgaatagctggggagtgttctatttagaagcgcagaaaggttattccacgttggatgccagttttattatttccataagttccatttgtggaatagtcggtaccgttttttcgggtattatttctgatgagctgtttgcaggaagccgtaattttcccgcattaatctttggactgatgaatgtgatagctagcataattgtattcttttcatacgttgttttctaatgcaaacttatataaaaaacttgatttataagcgtgttcaataaaaataaagaccactccgttcgttcatatttcgagattcccgaacatttagtatctttcaagtgctaaaaaatagtactaattatatgaggaacgtatgtggtcttaatgtgcataaagataatgtgtttatgtgcattctcaaagaaaatggtgataaaattgaagaaaagtttggtgtattaactcctgagcatatcttttatttcaagtgccgataatatgctgaagtaatcttcttcgtttatcttacataatcgacaaaagattttcttatttgctccttcaggtagtaaatttgtaaagaaggggaacaagtattggcttgtgtacgattggtgagacttagataaagtcaatgagatggcaggaagggaaggattgataaaataaccatcatcataacaaaacgtatattcttgttttgaatgttcagtaagtaatccggcgtaaatatgattacagaatatttttaattctctcataggtgttactgtttttagcttgttgttttctttacattaaggcaaatttctagcccaagtacttcgcaaattttttctattgtttttaaggaagggtttcctttttctcgttcaatgttcttgattgtggataaacttatctctgatatttcagctaaatcctcttgcgaaattctgaggatgcttcttctgcttttcaatactttataaaactccatagtttgatataatgagctaattatgtaaatatagtgagaatgtattggaatatctataaaagtttaatttaataaacttctaactaatcaaaatacattcaattgatgatttattaagatggctatatatttattgattttctgatatacttattgttgtttatatcttgaaaaactttatctttgcacaggcaattgttatctatagtgatgaagtataggtagttataggtgatttttcctataatcattgatttattataataactgtggtaacttgtgctatttttgatatgctaatagatacttattgtgtttttggcacgattttggcacggtttctgtgtaatttcttgatttacagtatttattacttttgaggaagtgaaataaaatcgctgaataagacgattgaaataatagaaaaggggctgaaagtcatagactttcaacccctttttatttttgaatgactattattctatatcggaaagttcaaaaaaaagtccgtacgtcttttttttagggcgatttgtcgaataaattttctggtaatgaaaatgtagcttatctttggtataacaaaataacatgtaatgggtatgagaacaatttattttctattatttcccttgtttttgttttttatagtatcctgtactgaagatgaagtagatcctaacttctcgatagagaatgtcggagatgtcgtgatgggttcggctaaaggttcgcaggtaacaatcagttttacgagtacccgtgaatggaaggcgagtacagttgcggattggtttacaatcgctccggtttcgggagaagcgggtacgtgcaatattacgcttactgctatcagtgagaatataacaggaagtgtacgtacggcaacgcttacattaacttccgggacattgacacaaaacataatcatagagcaggagccggcagaatttgtgaatcttgagcagaatatatataatgtatctgttgaaggtggggaattggatattagattctctacgaatatagctgaagatgaattgttgatttatggttctttgggtactggcacttggctgacacaggagacaaagactcgtgcatcctcttcctacatgcttaatctgactgtattgcctaatactgatggtgtttcccgtactgcctatatctactttgtgaaagtaactgatatggaatcaatcgtagtagagatagttactatcatacaaaggggggaagtggctagtgaatctactgattattcgtcagataaaaaagtacgtgttctgcaaacagcaaagttgggaaaagggcttcctattgtgcttatgggcgatggatttatagatactgaaattaacgatggaacttatgatgcggttatggacaaaacttttgagaatctttttacggaagaacccatcaagtcacttcgagattattttaatgtatatgcagtaactgcggtttcgaaacacaatatttttggtacaggatatgaaacagcgcttggttgtgaactggcgggtggaaacagtacggggatttccggtgaagataatgctgtacaacgttatgtacaatgcgtggataatatagatatgagtgaaacattggctgttgtaattctaaattctcctgcgtatgcaggaactacttattttggttatactaatcagacgaaagtggttgagtttgctattgcttattgcccggtgatatacgatttgcaaagtgaaagtttcaggcaggtacttgtacacgaggctgttggacatggttttgccaaattggaagatgagtatgcttatcaggaaaatgggactatttcttctaaagaaataaaaaatgtacagtatctgcagacattaggatgggcgcagaatgttgattttacatccgatccatctcaggtactttggtctgctttcttgaatgataatcggtatgtgtcagaaaaactgggagtatttgaaggggcatgtacttatataaaaggggcgtatcgtccttcggaagagagtatgatgaatagtaataccgagggatttaatgctccttcccgtaaagcgatatatgataaaataatggaaagaagtttgggtacacaaatgtcttatgaggagtttgccgtatttgatttgcagaataaatcacaaacgcgcagtgctaaaccaactgtaggaccaagtaaaccattcacacgtcctcactttgtaaatagaatgttagataagtaaagcagatgaggctgaacttcaaatttagttttgagttcagcctcatctggactttatatgtaacgtatttattttgaatcagaactttattgcagtatacagcctatacagaaacattaaagctgttgtatagtgggtactatacttttgtattccattctggcttagatacaaattacgttaagtacagtatttctctaatcttttcccggttgcctacaatccagacgagatcccctaattggaaagttgtgtctttatccaaggtaatcagttcgtcatttcgttcaatggctacaacaatactgtcatgcttctctcctaaatgagactgcgcgatagtctgatttaaaaagcggaattcttcgtctaccgtgaaagagtggagagttatctttttatccactgcatctgtatctgatgtgctttttacatcttctattctatttctaaattcctgtaattgtgtatctgtaccaactactgtcaatttatcctgcggatagatgtgttcagagcttttcggtatatatatgttcagatcgccacgagtgattgcgacgacatttactccaaaattttgcctgaatgaaagttctcctaaagacttgccgatgtaatcggaataaggcgatactaggatagatgtcaagtcaaggtctttatcattgaattcgctattgaaacttgtttttagcgggtgccgttttttagctacctcttctcgtcggttaagattggcaaggaatcttgtttccaatcgtgaatattgcgtgaggtcttccctaagaataagaatcaatgctactacggctatggcaataatcacacttattccccagttgagtttaaagtagctgatgactacactagtgataaagaaaagagcaacagatacacgtcccagaaccagggaaaccaggcgtccgtgattgtaattctcgtctctccatagcttcaggaataattccgaagagttgtatttgttggagatgagcgcccataaaaaaggagtcataagcagaagagtacccagacacatcaccaatttgatccatatagtgataggagtaaacatttcgctgatggcgggataaatgatttgtatcgacagcagccaaatagcagtgagcagtacgctatagatgacaactctcccaatcatgttttttagtaatttcttccagtcactatcgtggttcatggtcttcttgccggaagcataacgatctaatgtctcctgtactttagtaggcaatattttgtaaagccattcggcaaaaggattggctaaacggataaagtaaggagtcgtgaaagtggtaataacagatacagccacaatgataggtgaaataaacggatcaagcactttgagcgaaacacccagtccggcaataatgaaagcaaactctccgatttgtgccaggctgaatccggatttgatggaagtgttcagtggttctccggataagagtacgccaaacgaagagaaaatggctttgccgataatggtaaccagtgtaatgatgatgacaggccaggcgtattctaccaatacagccggattcaccagcataccgaccgaaacgaaaaagatagctccgaagagatcttttaccggttgtatgatatgttcgatatgttcggcctcgatggtttcggcaaggatagatcccatgataaatgctcctagcgctgttgaaaaacctgtgtaagtagccaataccaccattcccagacaaagaccgagagagacaatcagaagagtttcgttattcatcaacttctttgcttttttgagaaaggccggaataacgaagatacctatgagaaaccacaggattaaaaagaaaacgaccttgagcacacttatcagcaaatcttcacccacaaagtcctgactcactgccattgtggaaagaagcaccatcattaagatagcaatcaggtcttccactaccagagtaccgaatacgataccggtaaaacgttggttacgcaattccagatcattgaaggctttgataatgattgtagtggacgacatagacaacattccccccaggaaaatggaattcatagtgccccatcctaataactgtcccaccaaatatccaatgagcaacatactgattacttcggtgatagccgttataaaagctgtggaacctacattcatgagcttcttaaaactaaactccagtccgagtgcaaagagcaggaatataacacctatttctgcccatatattgatattctcaatatctcctactgtagggaaaatattaatataaggacctgccagcaatccggcaataatgtaacctaagactaaaggctgttttagccatttgaacaacaaggttatgatactggccgatattaatatcagcgcaaggtcggcaatcaaagttggcaagtgtgacattagatgtgggtttatttattataacattcctgatagataatatgtttccatctataaaaagatggaaacaatataataaatagctgcagctaagagtccactgactggaattgtaagaatccaggcagtcatgaggcttttggttactccccaacgaacggcagagaggcgtttagttgcacctactccaataatcgctcctgtgatagtatgtgtagtactaacggggattttcaacatttccgtaatgtagagagtgaaagcacctgctgtttcggcaatcactccttccaatggggttactttggtaatttttgttcccattgttttcactattttccagccaccggacatcgtaccgagtgaaattgctgtgaagcacgaaaaagcaacccagtcgggaaggtcattgatgctgttgatacccatgcccaatcccattgaatggccggctatcatggcagcggcaataatacccattactttctgtgaatcgttcaggccatgtccgacgctgaagagggcggaggatacgagctgtaacctcttgaaccattgctcggctgtgtggggatgtgcgcgtcggcagatgtagaggacaaacagagtgaaaccgaaagcaatgaccattccgataaaaggagccagaaagataaaggctgcaattttaagaatgatgttaagctgaattgcttcaaatccgtttgccataatggcagctcctgcaaaacctccgataagggtgtgtgaggaagaagacggaatccctttccaccaggtaaccaggttccaagtgatagccgctataattcctgctaatataatgggcagggtgatatattgctctaccacagtcttggatactgtattggcgataccgaatccacctattatatatttggcaatgaaaaaggctacgaagttgaagaaagcagcccatattacagcttgaaagggagtaagcaccctggtagatacgatggtagctattgagtttgctgcatcgtgaaagccgttgatataatcgaatatcagagccagaatgatgatagtcactaataattccatgtgttccggcttgctttatgcgtactttacaatcaggtttttgagaatcttacctacatgctctgcggcatcggtcgttttttccagttcatgcatgatctcctttattttgataagttcaatgcaatctttttcctcttcgaaaagtttggtgataaagaattcgtatacatcatccgcctggttctcgatttcatgcagtttggaacagtattcacggagaagagtcggtttcttacggaatgtttcgagttcgtccatggctttgcatatatagatcgcttcctcctgaatcaaacggctcaactctttgccattctctgaaataggacggggattgtaaatagagattcgtttggcacaactgtttattccgtcaatgacgtcatccatgcaggaagctaagtcatgaatatcttcgcggtcgaaaggagtgataaaggtagtacctaattcatcaaaaatcaggtgtgtcagtctgtcgccttcccgttccaggtctttgatttttttgtagtagtccgaacgttctgtaggtgagtcatgttgcaagctttctattaaaacaactgatgcttcgcagagcacttctgatagctgtttcagtaaagggaaaaatttgggctcctttggagtaaaccggctaaaaaaagaatttttcataagtgtaaaaactttaaattgttttttcttctctatttatattagtaacaaatgaatacagattatagtttgctgtttttaagattttagtttggcacgtactacctctataatggcaggcaatacagagataaatatgatggctacaatcagtaacttcaggttttcctgcacaaacggaaggtcgccgaagaaataaccagcataacagaatacggcaacccagagcgcaccaccaactaaattatacatcataaaatagtagtaattcatctttcccattcctgctacgaaaggtgcaaatgtgcgtactatcgggacaaatctggctagaataattgttttcccaccatattttttatagaactcgtgtgttttctccagataactttgtttgaatatcctggagttgggattattaaacagctttcgaccgaagaaatgtcctatcatgtaattgcaggaatcgcctaatacggcagcggcaaataagataatgacaagtatatgcacgctgatgggcatatcgggtaatgttgaaatggctcctgcaacgaagagtaaagaatcaccgggaagaaaaggagtggccactaatccggtttcacagaagatgataaaaaacaagatggcgtatgtccaggcatgataatcacgcacaatcatcaccatatattgatcgatatgaagtataaaatccaataaaaagtccattttatatactttggttattattgtaatgaaagaatgttataggcttccagaccatagtgaattctcttttcactcaaatggtggaggcaaacagaaagtggggcataaaagacttgaattgtcctatgccgaaaaaagatataaaatggctaaatgagtatgtgtcctaatgaatagatatgatatctatcggaatatttaaaaagattggtataatatgaaaaacctgtccattgattttgaggaagttgaatctttagcgagcttagtatgcggatagtgacagaaggaatattgaatcttagtatttttaagggagagaggtggcggaaggaaaatggatttaaaacgccgttatcgttattgtaattttgctttccggcgtattcttttgtcttgactagtttctgttcttgatccagttgtataatgctagctttagaggtatatgaattggaataggtttgtatgccgttactaccggcttctaaccggtatgcctcttgtgcttcgttgaaaatcagatggaatccccaacacagaaatacgcctaatagtatacaaaatatgtacttcatcataacggccgcaaaggtagaaactatttttatatgaaatacatattcacaagcataattaacaattatatcagtgattaccgggaattattctttgaagttgcttatcgtaaatttcatcggagtatatgttatcccattggtacattgtttcttattaattctcggatataacattggaatatgatttctttttcttttttttgtaaaagctgtagggtatttccagtctgagcgctcttataaatagaaacgtaatttatttacctttaaaaagcatcagtatgaagaatgtagaaaaacacttggttggatggctgtcaatttgtttgctgctttgtagctttcctgtgtgggcgcaaggagatgccggagattatctaacaatcgttggtatggtgaaagacaagcaaaataaaaaagctctggagaacgtaaatgtatctgtgcatggcagtaatatcggcactgtgacgaatgcggaaggagaatttgctttgaaaatcaaaaaaacagaagcgccgcgcgaactagagatttcacatataggttatgtaaataatcatatctctctggagaaagaaacaccctctaagttgacggtttggctgacacctcatgccaacctgctgaatgaagtggtggtgtttgctgaaaatccacgtatgattgtagagaaggcaatcagtaagattcctctaaattatagtgataagcgtgatatgctgacgggattttatcgggagactgtacagaaagggcgtcggtatatcggtatatcggaggctgtaattgatgtgtccaaaacagcctacactaatagaaatactaattatgacaaagtaagggtggtgaagggacgtcgcctgcttagccagaaagcgagtgatacattagctgtcaaggttgttggcggccctaacttgagcatcactttggatgttgtgaagaacaagggagcattactcgatatggaagaattgaataattatgagttctggatggcggaatccatgcttatagataaccgtatgcagtatgttattaatttccgcccgaaggtaatccttatgtatgctctcttgtatggcaaattatatatcgatcgtgaacgcttgtcatttacccgtatagagatgagtctggacatgcaggataaatcgaaggcaaccactgccattctatataaaaagcctctcggtttaagattcaagccgcaagagctgtcctacctggtcacttataaagatgtggatggaaaaacttatctgaattacattagcaacacaatccgtttcaaatgtgactggaagaagaaactgttttccacaagctatacagtagcttccgaaatggtcgtgaccgacaagagagaaggaatgttggagactattcccaacaaagaagccttcagcttgaatcaaatattctatgataaagtagacgaatattggagtccggacttttggggaaactacaatatcatcgaacctacggaatctttggagcacgcagtggataaattaaaaaagcaatcgaattgaaacagggatagttttcttatatttgaggtcaatcataaagaaaagcaagtatgctggatgaactgctcatactaaaaaagataaagggaggtgacataaaagcgtttgaggaactctttcgccgttactattttcctctttgctgttatgcggcaggcattaccgggcaaatggaagtggctgaagagattgtggaggaacttttttatgtactttggaaagaaagggagcgcttacagatctttcagtccgttaaaagttacttgtatagagcgactcgtaatcaatctttgcagtattgcgaacacgaggaagttcggaacagataccgtgaaactgtattgactacttccaacccagagcagtcaacagatcctcatcaacagatggagtatgaggaattggagagattcataaatggaacccttgaaaagctgccggttcgcagacggaggattttcgagatgcatcgtctggaagggcggaaatatgtcgagatagcgacgcagctttcgctttctgttaagacagtagaggctgaaatgacaaaagccctccggacattacgagaagaagtagaaatttatattcacatgaagtgatgaaaacagatatttataaaataaagacagatcaggcgtggaatcgattgtataatcgcttggacaatgaccgtttacttgcgaaagtggatgaaggccaccatacacgcaaatattcacaatggatcaggtacggagcagttgccgccgttttgataggcgtcatttggggaactttgtattgggtgaccggttctgataaagaactggtacagcatcttcttacacaggaaaatcaaggtgtttccactttggcaacgactctcgaagacggttctgtcgtactcttggcaaaagaaacttccctgttatatccgaaacattttattgctgataaacgggaagtgagtctacagggaaatgcgttctttgacgtagcaaagaagcagggacaacccttttggattgacacggagcaagctaagattgaagtgctaggtactgcttttagtgtgcaaagtgatgaaaatgctccgttccgtttatccgtacaaagagggatagtgaaggttactctaaaaaaaggaaatcaggagtgttatgtaaaagcgggggaaatggtagtagtgcgatcacaacgattagtcgttttggatacagataaggagaatgaagagtgggggagcttctttaagcatatacgatttaaagatgaatcgttagcgaacattctgaaagtcatgaatttgaattcggatagtttgcaaatacaagttgtctcaccggcattggaggaacgtcggctgactgtcgaattctctgacgaatcttctgaagttatagctaatctgatagctaatgcgctcggtctgcaatgtatccggcaaggagatattcttttattatcggaatagaactcattaaagttgggaaaaatgaaacagtcttatcattatctgtccgttctgctgatactcttcttcttcgtcgatatgatgagagcggatggaagtgatgtgctggaacgtatagtcagacttcccaagataaaaggtactgtttattcattgttgagtgatgtctctcaacagtcgggatatatgtttatttatgatagtaaagtcattgataatgatgcagtagtgaagataaagggaggcgaacgttccattcgtcaggcagtgtatgacatcgtaggaaataccagtctggagtttcaagtgatgggcactcacatcctgattactctcccttcggagaaaaaggtacgtgtgcaacaagattttgttccggaacagataacaaactttgtcattatcggtactttgctggataaggagacaggaatacctatctcttctgctactgttggagtgcgaggaacatctattggcagtataacgaatcagaatggagattttaaactgtctttacccgattctttgaaaaatgattcgattactttttctcatataggttatctttcacaggacatagagtttgctttgctgattggacggcacaatatacttagtctcgaacctaaagttgtccctttgcaggaagtggtgattcgtcgaagtgatccaaagaaacttttgcgtgaaatgattgagcggcggaataagaattattcgcatactccggtatatctgactactttttatcgtgaaggagttcagttgaaaaacaaatttcaaaacttgtcggaagctgtgtttaaggtttataagacatcctcatattcttctgtaccggatcaggtgaagctgttgaagatgagtcggctaagtaatgtagaagcaaaagacagcttgcttgtaaaagtaaaatccggaattcaggcttgtatccagatggatatcatcaaagatatgcccgagttcctgactcctagtgtagagaagggtatttatgactatacttcagaaggagtaacatttttagaggaccgatttgtaaatgtggtgcattttgagcagaaaaagggaatcagcgaacctcttttttgtggagagctatttcttgattccgagacaagtgctctattgcaagcccgtctggaagttcatcctgtatatgtgaagaatgcggcaggtatgtttgtcgaaaggcgtacgcgtaacgtgcgaatgatttctcaaaaggtggtatatacaatttcttataaaccgtggcaagggacttattacatacaccatatccgtggagatcttcatttcaaagtgaaacgggtaaaaatgctgttcggcagccgggatcttcatatctggtttgagatgattacttgcaaggtggataccgagcaagtggtcgtatttccccgtacagacagattgcccacccgtaccatcttctctgacacctatttcaaatatgatgagaacttctggagggacttcaacgtgatcccattggaagaggaaatcagtaaactgatagaaaagatctctttgaagatagaagaaataggtgattgatttgttttgtcattcaatgagattgctgtacctttgcatccggtttaaaagattgtatgttatggaattaccaaaagatccgatgatgttgttcagcgtcatcaatatgaagttacgtgattgttattcttcacttgacgaactttgtgaagatatgaatgtggacaaggatgaattagtgaatcagttgaaagccgtgggctttgaatatagtgtggaacacaataagttctggtaatcattttcttgtttacaacttatagataaactactaaaagtgccttcatcgcctttacaaaggatatggaggcactttttatatcttatgcgcagcttctctcttactctttcttgttaataaaagcaaaatgcggattcccgtatttaacttccccgctcttcttcgttctaactaataaagctcagaaaaagaattgatgataaacgagaataaaattcgtgaagcttgtgcctcgaatcgcgaacggggattcaagatgttgatggactcttttcaggtaccgatatataattatatccgtagactggtcgtatctcatgaagatgcggaggatgtgcttcaggaagtctttatccgggtgttccggtatatcgatcagtttcgcgaagaaagttcactgtcaacctggatttaccggattgccacgaatgagagtttacgcttgctgaacggtcgtaaagatgagggagttgtttctgcagaagatgttcaggaagagttgatgggcaagttgaaggcttccgattatattgattatgaaaatgagctggcagtgaagtttcaggaggccattctaagtttgcctgaaaagcaacggcttgtattcaacttacgttattacgatgaacttgaatatgaagagattgcccgtgtactggatagcaaagtggatacactaaaagtgaattaccactatgcgaaagagaagattaaggaatatatattaaacagatagaatgatgaaaaaggattttgattttgacgatattggtaaacggacaccttaccgtacccccgatggattcttcgaggatgtgcaacgaaaggtgatggaacgcgccggagtgaagcaacagcggaaatctcacatgaagctgattatttctacggtgattaccatggcggcagtattgatcggatttttgtttgttccatctttgagacaaacagatgaggtgaaaacgtcttcttcgaaagtattagctaatggtacagaatctgtagataaatggattaaagaactatcggatgaggagttggaagagctcgtcagcttctctgaaaatgatatatttttgaattaagtaactcaatcaattattttaaacgtgaagattatgaagactaaatttatttatgtaattatggccgtcctcctgatgggaagccagatgactttgtctgcacagaatacggataacaaacaaaaaaaacagcgtcctacaccagaacaaatggtgcagatgcagactaaacaaatagtaaaaacattgatgttggatgatgcaacggcagctaagtttactccggtatacgagaagtatctgaaagaattgcgtgaatgtcgtatgatgactcataaggcgagaacagagaaaactaaaggacaaggcacagacgctaagaaagaacggccgtccatgactgatgacgagattgcgaccatgttacggaaccagtttactcaaagccgtaaaatgctggatgttcgtgaaaagtattacaatgaattcagcaagatactttcgcagaagcagattttgaagatttatcagcaggagaagatgaatgctaataagtttaagaaagagtttgatcgaagaaaaggacagaaaccgggacagggacatcaccaggggcaaagatctcgcgctccacgtccggaccagaaataaatattaggtttattttattatagttttattttactaaatcaacacaatttgaacatagacagccatatttattcttttcagtaccgtttgattacttgttatgtcttgttactgattagtttgactgtttttgctcagtccggtaaagagcgtttttccggtcgtgtgattgatactgaaacctatcagccggtaccgtttgctacggtccggcttttagctttaccggatagtacattgttgggcggcggcgctacggatgctatcggtaaatttcaactttccgtttccattcctaatcatgcaattaaagcgaagtctttattattacaggtgtcatatgtcggatataagcaggtttttcatcccatttccagcaaaagctcttcttacgaattgggggatataaatctgactcaggaaagttatgctttggatgaagcagtggtagtagggcaggctccaatggcggtgacagagggggatacaacggtattcaacgcttctgcctatcgtactcccgaaggctcaatgcttgaagaattggtaaaacagcttccgggaggtgaaatagatgcagacggtaagttgctaatacatggcaaggaagtaaaaaagattggcacttatatacgactcaacacctagccttgtgccataacttttagttataataaaaaagctctttctagttggtgttaactggaaagagcatgtttctttttcgactgctaagatagcaatttatttctgatttccctaatgtttttggatatttttgctatacataaaagtacagcccaagttacaacacttgatagtaaagtagacagtgtgattgctaatccagtatattgaatatctccatatttatcgtatgccataataaacgtgagaacgattgaagctattattcctatcgtaagtacaatattagcaattacaattagagtagcttcttctttgttacatgagtttaatacagaatcctctttttgttcttgcttttctttaactaacttggagtagctaaactttaaacaatcgagacaataatcagaaaaatcattatctaactttttgccgcactttttacattgcttttccataacattttgcgttttattggttaatactaaataataatgtttccatttagttagcatcacctcacgcatatatatgaaaaaggcgtagagctaatgcctaacgccatcgagggctaccacaccctactcacttataggcaaaagtctacgccagtatatggcgtataaacgcaatacacccataagtgagtccaaaatagccttattgctgtcaatgtggtagttcgatggcgattaggctataatacgtaaaaagcgcaccatctattcgatgatacgctgcaaatataagaataacttcataaataacaaactgttagtccttcttcttttcctccttgtctttatctttctcatcttcgacttgatccggtgttttcccttccgcaatgtgcgccatctttcggagcagttcatcgaactgttctttaggaacagaaaagttaatctctaacctcactgttttaatgttacttaggtctatttcttgtttctttttctttcccataactaagctgcattacgcaaaagtaaattaaatctttgagaatcggtaaaatttcgagtattaaatcggaaaatatattcgtcaatatacctctgcatatattttttgcttacatgatagtatatcccaaatatcattctcttgaaatgtgaccacacattttcgataccgttcgtactaacaacaattatctcgccttcatctgttgcataggtcgtaccatagaaatgtttttcatggtctactgacctttgtacatacttcccatgcagtccactgtaatcccaaccatcagtataaacaacactacctaattcaactttttctttgataatcggaactatagttttagcttgtgtattgggaacaactttggcaacaaccttaccacctctttcaagtattccgaatacaggaactttatccttataactacgtccttgacatttctctactttcttatccttatgtctatttttattcttcccacctacaaacgcttcatcaatttcaacctcaccggataaagtatggctattctccatctccatatattgtctaatcttatggagcatcttccacgctgttttttgagttatacctaaatctctcgctaattgacatgatgaaacacctctcttatgtgacaagaataacatcatagcataaaaccatgctttcataggcagtttagtattggcaaatgcagtaccagttttaacatcaaagtatcttccagtattcttgcatttatacttaccattaccacatttataaaccttagaattgctgtcataaggcgaaatgacttcatctccccatcgcatcttctcaaaatatctgatgcaactttcttcatcgggaaagttttcagatagagttaaaagagtaaaatcggttttcataacgtcaaatttttagctatccaaatatactaaaaatcaacgatattagcaagtaatttgcaatatattttcaaggaagtttttcgcaaggatgctaaagaacatttttatacaacatatagagcaatgtactgcttataaactataaacagtacatttgtcacaaaaataaactgttatgaattttgaaaagatatttgagatgttaaatgagctgcaaaaaagtgctcttatttgtttaattatacaattaccactatgctatacttttatgtatatatatagtgatttctttgcccaacaagatttcataaacagaactatttttgcattatctttagatatgtctattcttttcatttctatatttggtttacttatagtatcaataatattaggtcgttatgataccagctctgtaatgtatttattcacaggtggagttatttactctttttccatatatatattagaaaaaatagtagataataatgttggcatatcgaagatagtgataaattacatattttttatgtcaggtatttttattacctctattgttattaggattatagaacataataaaaaaaagaaagtttaaaaaaacaagacctaaaacatgaattatatcaataatatcaaatttcatactttctaattttttagttaataaaaaagcccgtatttctacgagctataactatttgttatgacctaacccactagtgtcgggtcgtatataagtgccaaaagattttggtggacggtaaagagtttttctctgatgatccgaaagctgctcttaaaaatcttcctgtggagatggtggagaagttaaaagcgtatgaacgtcaatcggatttggcacgtcttacgggaatagatgacggagaggaagagatgattctggacttgtctgtgaaaaaaaatatgaaacggggctggatggagaattttatgggaggatatggaagtaaagaccgttatgaattagccaataccttgaaccgttttcgtgaaaactctcaattaaccattatcgggaatctgaataataccaataaccagggattctcggaattacagaatgaatcttccagttcaacaggcaatatccgtagccggatgggactgactacctcccgctcattggggcttaatgcgacttatgattggaagcgcgttaaattacgttcaaatattcaatatgtcggcaccgatcgtttggaagatagccgtaccacagtcgacaactttctccgggaagataaatcaatcaatctgggcacgagtcatagccgacaacagaatcacgaactggtagccaatgcttctcttgaatggaaaatggattctgttactacattgattttccgtcctcaatatcgtttctcagccaatgacagagagaatagtggctttcaggaagggtgggggaatgatgtcttgttgaatgaaagagagtcctccggcaccaatcataattcccggtataatctgacgatgatgttgcaacttagccggaaattgagtcgtttggggagaaatgttgctttgaaggtagactatggtactaatgcttcagctacagaccgaaagagcctttccaccacccggtacttcaaaaataatacgaagaagattcagaatcagaaaatagaggatgatgttgacggctataattaccgggtgcaactggtgtatgtagaaccattgccgtggcggcatttcctgcaacttcgttacagctatcagtatagagtgaacaattcggatcgttttgtctatgactgggataaggaactggaagagtttgctcctgactttgatgaagactctagtaaccgttttgaaaatcaatacagtaatcacttagtgaaccttgccatacgtacttcacaaaagaagtataattataatattggtgttgattttgaacctcaaaagtctgttagccattcattgttgagtgatgctcccgaagatcagttggaaagatcggtcatgaatttttcgcctactgtcaatttccgctataagttttcaaaacgcacccgtttgcaaattgtgtataggggaaaagggaaacagcctaatatacgtgatctccaacctgtgaccgaccgtaccaaccctttgaatatccgtgtcggaaacccttcgttgaagccttcatatatgaatacttttacgctgaatttcaattcttataataccaaatatcagcgaaatatggtagctaccgctttattcgagaataccattaacaatataactaatcaggtgacttatgatagtgaaaccggtgtacgaactacatctccggtcaatatgaatggtaattggcggggcatgggttctttttctctcaataccccttttaagaatcgtaactggatatttcgtacttactcctatctgcaataccggaatcagaatggctatacaaccttgaataaagaagaaccggtgaaaacttccgtacagcatttaacgggacgtgaacgtctacggattacttatcgtacccgccaaatggaacttacagggcttgttggcctgacttataacaattcttataatgacgtacgggagaaacgtactgaaacttttgattatcaggcaggaaccgaattgcagctttatcttccctgggggatggagttatataatgacctgacttattttcttcgtaccggatatggttatgagggttatgccaaagcaaatttcatgtggaactgccaactgtcaaaagcctttttgaagaggaaacagttactaatccgcttcaaaatatatgatattcttcatcaggacatttctatgatacgcacgataaccgctactgccattcgtgacactgattataatgcgctaggttcttactttatggtgcatgctatacttcgtttgaatttgatgggaaaataattagaaattaaatcttcattagtttgaaaaccacagcagggttttgattgttgtatgtcctacgtataaaaacaatgtaaggctggctgaatgtttcgactgataaaaatgataaaagataaaggtcgttggcgcatttttaaactgaagttgattgatgcccgactgtactttgtcagtatcttcgtaggattactgacaggacttgtggctgtgccttatcattacctattacagtttttctttaatctccgtcacgatttctttgattctcgtcccaaatggtattggtacatacctctttttcttttgatgtggggaatacttgtattcgtatcctggttggtaaagaaaatgccgcttattaccggtgggggtattccgcaaacacgtggagttatcaatggtagggttgattataaacatccttttctggaattggtggcaaagtttgtaggtggaatacttgcattaagtaccggattgtctttggggcgtgaaggtccctccgtgcaaataggttcgtatgttggatatttggtatccaaatgggggagggtgcttagtggtgaacggaaacaactattgtctgccggcgccggtgccgggttagctgctgcttttgctgccccattggcttcatcattgttggtgatcgaatctatcgagcggttcgatgcacctaaaacagctattaccactcttttggcaggagtagtggcaggtggagttgccagttggattttcccgatcaatccttattttcatattgatgctattgtaccggagatgactttctgggggcaagtgaaattgtttcttttgctggcagcagtggtttctgtctttggaaagttcttttctgtcaccactcttcaggtgaaacgtatttaccctgctattaagcatccggaatacgtgaagatgttgtatttgctttttatcgcttttctgatttctatggccgagtttaatctgaccggaggaggggaacagttcttgttatcacaagctatgcatccggacacgcatattctctggattgtcggcatgatgttgttgcattttgtttttagcactttttctttttcttcgggtttaccgggaggaagttttatcccgacgctggtgacgggaggacttcttggacaaatagtgggattaattatggttcaacagggtgttattgcttatgagaatattagttatatcatgttgatttgtatgtctgcattccttgttgcagtaatccgtacccctttgacagctattgtactaataaccgagattacggggcatttggaagtcttttatccttctattgttgtaggaggattaacttattattttacggaaatgcttcaaatcaaaccgttcaatgttattttgtatgacgatatgattcattcgcctgcatttaaggaagaaccgcgttacacattgtctgtagaaataatgagcggctcttatttagacgggaaaatagtagatgaacttcgtttaccggagcgttgtgtgataattaatgttcatcgtgaccggaagaatttgcctcctaaagggcagatattaatgcccggcgatcaggtgcaaatagagatggattcgcaggatatagagaaactgtatgaacctttagtcagtatggcgaatatttattaattgtctgactcttatcctttgatatatacaagaatagctgaaagaatctctctttcagctattcttgtattagtatattaagtatttattttttcttataccaatcggagtttgtaccatatttagcccaatctataaatttaggatagatttcattgataggctttttctcatttttattgaaattctttaattctgcaatatcatcagcgttggcatttgccaaatagaatgcaaaaggataaatattctcttgattagatacataataaataccttcattgggcttggaacggtcatcgttttgtccaaagaaagaagtgtcgactttggaagtcggtttttgcattgggcaatgaatttccaagcgattaccttctttgctgggacgataaatgaatgcgtcgattgatgtttcctgttttttatttgaatttttatctccgtatttgaacgttaccttatattcggcattcgggtttgttttgacattatcagtcaatatgattgcattactttcacgggtaaatttatcagttcccgaagctacagtgaaccctttttcaccttctttcttaattaagtattcggttgactgtgcatttcctgcatttgaaagggtgaaacctaatccgttagtgaatactgtatacttattatataaagttttaaacgtaaatgactcgcttaagatttcattgtatatattgaaaactttttgataagtatactgaaccaatacgtcattcatgtcataatcaccagctttaggccattcatcttcaaatgcgtatacaccggttttttcgatggttgtattcaagtcttcatctacaggaggaacattggttatttcaggattagcttttaatgagaacacaacatctgtaaagttttggtcgtccatgaaatcttcaaaagcaatagcaatgttgttgtttttatctctaaacatagctgtacgtacatctataccgctattaacttttgtgctgaatccttttgtggagcaagcataaaatccataggttagagtatggctattgaaacctgtaaaataagtgttccatgcgttgcatgcgagaacaaaaccgatgctatatcctttgggaaagttcgtcccctccgggtgttcaggatcatcaaaatattttagttgtacagctgtaccttcttctataccttgaggagaagctttgaggctcccgttattccacgtcatttgggtattggggaatatagcatatacctttacgtctttcaggctagtaggaagctgatcagctcggtaatagtagtagcctaatgagctgttccaacatgtccaacctttcaatgctgttaatactacggctgtttcatctttctctacatataaatctgcttgagtacgataatcttcaggacaatctttaaaagtattcaatactttatttacagtagtacgtaattcattcatttcagatttactcaatgtgagtttagggtccttacctttataagcgtaataaatgactccactgtactcatcgtatttacctagattcgtcttccatcctagattatcaaatctattctcatcaaattttgtggattctctgtaggatgctctagtcgtaggttgctcatctgtgtctgatactttcaaaacaccattaacaattttcccaggtattgctcgtctggcgaaaggtgatgtagaaacgatatatacatcagatacataagctggcaaatcaaccgttgcggtaaatttaccttgttcgtctgtccatgcaccgtctaatgcctgaacattttcttttaaggcaatagtgttttcaccttcaattaatggatttccatcataaatggagaaagggactcttgattcagaatcggaatagtcaatttctacttgtactttttgtacggtagagaaactagagggattagtaccagttcctggatcttcctggtataagtctttgtcactgtctacacaactgcttacacccattgcaataatcattgtacatgctaaccaaaacttcttcatatgcgttgttttttgtttatgcgataatttaagtctgttttgtgttttaaaataaacccgtaagttctttggaggtcaaaggcttacgggcacaaagatatatatattattcaacacaatcatcgaaaagttgaataatttttcgaaaatgtattctataacttgtattttttattcttttgtctcattattccatacttcttagccatgtaatttcttctttccatttactttcatccggagtttcgagtatcaacggtatattatcaaatctggaatcttgcattaatctttcaaaaaaagctttgccaatcaatcctttaccaatgctgtcgtggcggtcaacatgggtgcctaatgcttttttagaatcattcaagtgcataccacggaggtagttgaatccgacttctttatcaaattcatcaaatactttatcatattcattgacaatatcgtaaccagcggtataggtatggcaggtatcgagacaaacacctacccggttcttatcgtttacccgatcaatgatatatttcaattgccagaattcgcttcctaaattactgccttgcccggctgtgttttcaataacagctgttactccttttgttttttctaaagcgagattaatgctttctgcaataagcgacaggcaatcttctgttgatattttattgagagagctaccggggtggaaatttaaaagcttcaatccaagttgctcacaacgttgcatttcatccagaaaagcggcacgacttttttgaagtccctcttcctccggatgccccagattgataaggtaactgtcatgtggaaggatatattccggttggaaaacatatttctcacaattctctttgaagagactgatactttcttctgttagaggtttacttacccattgacgttgattcttggtgaataacgcaaaagcatttgctcctatttcgtgcgcattaatgggtgcgaactctacgccaccagaggcgctaacatgtgctccgatatatttcattgttctttcttaatttattttactctgcaaatataacgtttttaaaggagtatatgtttgtagagagaactcttcttggttacaattcataggatcatgtactttatactctgttctttatcttttattctctataaaaaatatcccgttattcaattttctataaattgaataacgggacagttttttggggggagagattaaatctcaaaatccggtaaatagtctgtcaggactttattaacctgtttcccttttacctgatctgttaccgtcgttgcaccttcctttttaccggcatcgtagtttaaggaaactttctccactttattactaacgtgaatagcggcttttcctttttccgtaaggttgcaagtgatagtccagtcacctacttgaatgatattgcctttgcgaactacctgcatatccggacggttgtctccatgtgtatccatcacagtcaggaaacgggcggttttgcaaggaacagttgtagaagagaaatgccagtgattaggatatttcactgcttttccttgtgcattcgtcacatttttccagttggtcggagcacagaagaaagtatctaccattgcctgttccgtttttgccgaactgaaaagatgggcaacagagataccgccagctttattccttccggttactttcacctcatcggtcagttcctgtatttccatcggtaattctacagtatgtaaaaggtaactccatgtaacagcctcctttccttccagttcatcataaatcacgaaaactccggtacttcccagttggatgatatgacggcggaacatattcagtttgttctcatcccatcctttttcaggcgtatattgcgtaccggatagttctccacgtttcagccataggggagaagtcactttaccataagcattggaagcatctcctaccatataagcgattttttctccttcataccaacgcggaatccagccatatccttccgttccaatcttttgagtcattccatttaccaaaatgctgttgtgtgcacgggtgttacggtaagaatacatacaatgatcgtccgtaaaacctgtacgatgtccgctgctgtaaaaaatggctttacctccatagaatgtattaaaagcattctgattggccagtgcatgggaagtggaaccataagaactggagcggaacgataacatggcattcttatctatatctcccaaagaggtattcatcgtaccgattcccgtttcattgaatactttcgccatgggtagttcggcaagagtatgtccttctttggggagaactttcttggttgtacaacgataccaggtcaagtctccagattttccgaggaaagttttttccatgatatccggttccttttgcagaatggtacgtacataagcagccgcccacggattattacattcacgtgccaaggcatccgcataacctactcgtgtaccgttcggcttcattttgctttcatgtgaattgccttgtcctgcagattttgagaatggaggctgctggtagatgacgtaaaatgcattgttgttataccacggatcggcgaagaaatcgaatccgctgatacgggagtagaaagcgggaacttcaatcaatgtgcgaagattgacctggaaataagaatcaccattgtgccatcctccatccgcgttgaggcccggcagacgggatacccattcattgtagcaataatccacccaggtggaagccatcgggagttcgccatacgtagcaaatgccgccatattcaagatacggaaagtcatttgccagacatgattatcagcaatgcggttttccaagtgattgacatattcatgatagaacttctttccattgtcacgaatcgttcttaggagtagttttctctcattcggagtcaacagattgtaccatgcatcatacgctgaagtgctcatggacagaatagtagaacgattgaaatctccagcaaagtacttactttttttccaggaaagaatttcggaaagacgcttaatgccttctttgtagtatacctcatctttcgttagcaggtaagcgcgtaccatggcttcgatatttgcttcttcacggtctacaatcttacgactttcccgaatcagggcagaacgatattgaacaatatttgtcaacttgacaacctgggttgtatcaatttcttcttccagatgtttcagcgggtggttcaggcatttatcggcttttcggatataagcctgtgcctccggattgtttttattccgttcgatgatattatcccaatcttcggcatcaagcaagatgcggggatgagtcttgggcaatttggttaatacttcctgtagagaaggagggttgaatgtacgtatgtgttcgtctatataaaaatgataaacaggtgaccattcttcttttccttctttgttaacgtaggcatgttgccaataccatttccctttttcaaagagtttgaatgggttgaaaaatgcccattttctttcggcggtaatcacttccgatttaaattcggggtcgcgtgcaatacggatgcggtaggttacttcgggtttgtagtcctcttcttcaactccgtccaatacagcaccgaggtgcgggaacttatccggccacataaaacgtgggggattgacagtaatatgctgtccgttcaggggcgaaggcgtttcgcggacctcgtgcatcaatgtctgttgagtcagacgcatgattcctttttgcgcatacccattggtggatagcagaataccgagcaaaagagaaaatatagacgttcgttgtttcatcatcttattttaatatttattattcatcatgtatcattcagcgtttatcgctgtttgaacaattctttcagacggatggtcttgttattaattagtggacgtgcccaaaaaccgataaaggttatgtagcctacgaaaaccaagataaataacattcctgtgcggagcgatgtagcatctgccagtgtactcacaatcatcggaccacccgcaccacctactattgcagaacatagaatacccgcaaaggagccgtgatgttgtgaggcggagttcagtgccaatgagaatacgatggaatacatcattgagatgctgaatccgacagcgggaaaggcaatgatagatacttctttgcttccgaacaaagcagataatagtaggatgatggtcaatattccggagatttgtaacaaccgtttgctgtcaatcagcttgagtagaatcatacctaccagacaaccggctgtcatcagcccccagaagtagcttacagcttgtgcaccttcagtttgcggatttactccatgatattgttcgaggaatgtactcataaaaatagaagttccctgttccgtacttacataacagaagattcccaagaaaaacaaccatacatatttctgtttaaacaaagcgaggtatgaatcttttgacccgcttttttcatcttctttcagttcgatcttgggaaagcgggagacaccgacggcaatcagcattactaataataggatggtgaatacccagtaaagagatacccacggcatttcccgtggagtgacatcggccaacaggtcgataaagaaacctttacctgctgtatatgttgccggatcaagttcacgaatcagataagtatataccagaggacttaggaaagaagcaatgccaaacatgaactgtgccagttcggcgataaatgcatagttttcttctcctcctacggtacgttggagcggattcaataccgtttgtaacatggccattcccagtccgatgatgaaagaagaagccaataacatcggatacgtgtgcatgcaggcaaataagatggtgccgatgaacggcatcagaaatccaccgaataataccggcttttcaccgaaacggtcgatgagcaatccggcagggatagacatgatagcataggccaggaaaaaagaggtcgggataaatcccgccattgccaggtcacttagattgaagttgtggataatgtccggaatgagtggtcccagaatattagtaataaaagagatggtgaaccaaaacgccataatcagcgccaacattcctaaattctttctcataatttaatcaggtttggagcagataattgagtaaatacaagtgacgcagctccaatacttccggccttgtttccaagagcggcagctatgatttgagtattcacagcacagtcggggatggcataactacgtgctttttcgcttactttctgaatgtaaaagtctcctgcttcggagagtcctccaccaatcacaatcttttgcggactgaagatattgataaagcctgcaattccgtgtcccaaaaagtcacagtgttcttccaatgatatttttgcaatcggatctccttgtttataaaggcggacaatcaattcaccgttaatctcttcatctgggtaggagatgcctgcgtctattattcgttgactgaagcggcgtaccaaagcagaagtggaagcatagtgttccagacagccgacagaaccgcaagcacacggttcgccattggcaatgagaggcacgtgtcccagctccgttccccggttggcataaccgttgaacaatttgccgtcgatgactactgcaccgccaatacccgttcctaccgtcaagaaaacaacatgagtggctccctgaccggctccgtacattgtttctcccagtcccatcagattggcatcatttcccaataaagcaggaagtccggtttgcgtttcaatacggtctgccaagtgaatgttttcccagccgttgatattttccgcacctcctaaaacaatacggttcgtacaatccacaatgcccggtgttccgattcctataccatcaattttgtagtctttttcctgtgcaaaggctttcacttcattgatagcagtaaccaactgtccgatgacagcttctgctgatacatcggctttcgacggtaacttcccttgaaagtaaaatacgccttcattatcaataagggcgtattttactgaagttccgccaaggtcaattcctatagcgtattctttctccataccacgttaatacttaatacttgatacttaatacttaaaaactacactctttccgcccaaatcggtgaactccaagcccattgtccgtcacgttggcgaacgcgtacatagtagtaatccgtatcccgctgcggctctttatcttccatgtaatgttccagagtgaaacagctttccggcatggcacgattgaagagaatagcctcgctcaaccaaccgatcatgaagtgtgaacgtgaaccttcaagcaactcgcccaacgtatgttcaaacttcttgccattgaattcggcaatgaccttaccgtcttttggcatttccacatcaaggattacagcttgcatggctgctgtagtcgtattcggattcttgctgctgtacatatccagttcggtttccttgtcgccaacggatacaatacggttgacatgtgtgtggaattcagtttcaccttcttgcggagaagtgaatgctgcgccacggaaacaaggagttacactatgaatctgtcctttgtctaccgacagtttgccctgccaatgtacgtatttctcttcacgattccaaccaaaatcaactttaactttgcaacgtaccgtatcaccttccggagcaacgggagtcaacggaccgttcatacgagctaaaatctgcccgttctttacaatatctacgtagtcgatacagctttcacctgtgacattcagatagatacgacggctgttaccgcgaactacatcacccatgaaagcatcgttgaggcggaagtcgataataatcttatcaccggttgcggcacatacatgacgggtacgtagagcttcccaaatggcatcgcgagtcagtgacggagccaaaacaccgatgcgtccgtcaccatagcttcccggataaccggaatgctggtcggtggaagccatgataccaaacttattgcccaattcaagaccatattgaatggttccttcccattggcgtggtcccatatcatgcaaataggggtagtctccctgatcgctttctgccagaccgtgacgggaatacatttctacgaatggagtaatatctccttcggtaaagcatttccagttgtaaccgcgataaccaccctgataacccatgtggtgcggggtaacgaataccttatgtccttttgctttttctttccagtcctcgattgaagtacattctacaagtggtgcgtccaaatcatagttcaacgcaacatggtctccatgttccatgctatgagcttcgtatcctacaaaagtcaggaattcaccttccttgttatactcatttgtcatttttacatacttttcataaccgccttcacgcaaacgcttgaaagctcccgtgtggtaatcgatcacccatttcaggcggggatcatctgctccgggaatatccggccacatagcatgaggagtaacactaacaaaatccaattgtcctttcgctgcttcaaaagcatcgcgcatgtcgccgtgtccgtatgtgatgttacagtggttgtgtaagtcgccccaatacattttgaggttgctggctgatggcataattttcttagcctctttgcttcctgctgcgcaagaaccgagcaagctgcccgaagctgccagtccgaggaaagaccagcctgtgttttttaaaaactttcttctatccatgatataattgtttttggttaatctttatttatataaatgggaatttatcggttaaatgagaatttatcggttaaataagaatttatcggttcttacaattatatatttattgggggtgccctgaaagggcttaattatatagcgtagggcaacgccctacgaaaaaagcacaccagccacaagccctgaaagggcggaactgtatacaattatgccctttcagggcgcaaattcagattgtcgtttttacgtagggcgttgccctacgctatataattaagccctttcagggcactccgcaaaataatcatttagcgatttttcatcagtcttctgtcacctttgaaaagaaccttttccttttcatccgggtctgtatctttatactgtttttgagtttcctgaagcagttgcatcagctctttttgtttttcagcatattccggtttgccgaagacattgttcatttctcttgggtcagctttcatgtcatacatttcccattcgtcgatgtcgttgtagaaatgaatcaatttgaagtcttgtgtgcgaataccataatgacgtttcacagaatgttcagcagggtattcgtagtaatgataataagcagctttgcgccaatcggcaggagttttgccttcgttcaccaataccggtttcagggaggctccttggatatccgatggaatctctattccggcaaagtcgaggaaagtaggagcaaagtccacattcatgctgatagcattactggtacttcctgctttaattgctttcggataacggataataagcggcatgcgttgacattcttcatacatgaagcgtttgtcaaaccagccatgttcgccaaggaagaaaccttggtcggaggtgtagacaatgattgtgttgtccagctcaccaattttttcgagataattcagcagtcggccgatattttcgtctactgccagaactgtcgccagataatcacgcatatattgctgatatttccagctgattaatgatttgcctttcaggtcacctttgcggtattcggcaatgcgtccggcatatacagaatcccatttatcctgaacttcaataggcatacgtttgtatacgctgtaaagacggttggtggtatctttcagcatttcttcacgagtcaacaatttgaggtcccagtcgtttgtcagtgtatgttcgatagacatatcctgttcacgggctgctcttccgcggccttcatagtcgtcgaacagattagccggttccgggaaagtggtattgttgaatatacccagatgacggggagcaggcatccagttgcggtgcggagctttctgatgatacatcatgcagaaaggcttgttcttgtcgcgaccttcgaggaattcaatggctttatcagtaataatatccgtggcgtatcctttttctacaatatgcttcccgttttcccaaaaatcagggtcgtaatagtcgccttgttcgtgttggccgctaaggatactccaatgatcgaatccttgcggttcactgataagatgccatttaccaattattgcagtctgatatccggcttgttgaagcagtttggggaatgtctgctgatctccgttgaacgtactggcgttatcggtaaaaccattctcgtggctgaacttaccggtgaggatgcaggcgcgtgaaggtcctgaaagagcgttgacagcgtagcagttgttaaaacggataccttcgttggcaatccggtccatgttaggagtctgaatcaaatttcctccgtagcaggacattgcttgagtggtatggtcatccgtcatcatgaagatgatgttcggttgtctggtctcttctttcttttgattgccgcaggaagcgagacttagtgcagctagtgggaggagtagggcagaggggatgtaatagttttccataatgatgaaggagagtgactaaaaagtcggttgcatctccaattcccttccttccggaaggaggagaaattgagatgcgaccgactttttagtcagctttattatagtttgtattttaatgactgtttctttccgtttactttcacttctacttccagtccgttttcatcgaacgctttgttcttgaacttagctgcaaatttaggggcatctgcgcttttcttaactggatagataacggtgatgtaacgtacagcttcttcgccgtctttctttacgttgaaagatacattcatacgtttgtaacgtttgcgataagcagttgagcaccaacccagttctttcttcatcgacataccgtcgggaccgaaacattgcagtttcatgttgctgccgtcttcaaattgtgtcaggaatgtcatgtcttcgcggctgttggctatttctccttttggcatttgataatgaagattgatggaacctttggcgctaccgatcatttcgtctacaatgacaaagtaagtgctgtcaacgaagaaaacggaacgacggtgtttcaagtttttgtaactaggattttcggtcactaaagtttggatagtaccttccggttgccacaatctagtaacggattctgtagtttccaagtttttgttgttcagcgttaccgtgttgtgaacacaagtctggcggtgccagttgcgttgttccatcacttcgccttcacctgcatatacatacgaacctgaatccgggaacaaattcttgccgttgaaccaaagttcgaatgtaccattatccggctgacaatgccagaatgctttcggacctgcttttactaccatttgcgtagcatccattccccatgagttacggaatacaaagaaacctgatttcaagaatcctttagacatataatccggcaatgcaccttctttaccttcagttgcgaagtatttgatagcctggtttttcgggaatagtttactccatgctttgtagtttttcaccatttctttctttgttgtcaacttagcatcgctgaaacatgggttggtataatcagggaaagaaatgtttgcgtagaacataatcatgctttcgatagtatccagataatcctgtgggaattctttacggaatccgttcgcatctgcgatacctaatgctttgcagaaaatgttgatagatgccagatgataatgtgggtcgagttcgaattgtccgccgtcttcgtatacctgtacatgaatttcacggttcagaatatcgataccgctttttctccatgccggagcatctttaaattcagggaagaaagcaccggcgtagatcatacgttgagcttcaaacagcaagtggttaccttgatcagagtagttggcaaggatgtgtatagcatgtttgtgatagttcaccaggaattctgtcaggaagtccggagtgaaagaaggagaaggaaggaataactggaactgtgaagtctggtcctgcaggcgattactaacttccagcgggcgccatgcgaaacgtacgttttctatttcacctttgatttttccatcacttaacagctcatattcttttttgtccatctttaccaacggattctttttaatccagtcgatatactgatgtgcccattctttagcatatttctcgtcaccggatatgcgataagcctttcccatcggagtgaaccatttgtggcggtgcaactgccaacggagttcattgtctttcaccggccagtattgccagttgatgtcttctccgtagttgtaagaaggctgataacctttatgtacgaagaatgtatgtttcaatccgtcatctgcccactgctgttcttctttgctgatagtcactttgttcagattgatatccggagtttttacattggtacgtgcacggtaatagtctaataatgctttggcagcatcctcatctttaccttcctgatgcaaagctttcactttctccaatcccggatagtccaagttaagaagcgaaaatacttcgcttttcagttcttgggcactagctttgcctacaaaacaagcgattgccagcagaacgatatactttaaagttttattcatgatataatttacgattttacgatttactatttacgattgagaacactcttacttttgtattattggatcactctcaactctccattctcaaccctcaacttcttcaattccatgaatctcttcaatgcttccagatagtaatagtcagcatagttcagtggagtgtcgatttcagaaccgttgggcagtgaaccgacagagtgcatcagaatgaaaccttgattgtcacccacttttgcaagatatgcgtcgcttgacaaactcttcagaattttttccgcataatccagatatttttgtccgtcgggaaccattgtgcttagttcgatcaatgctgaagcggtaacagaagcggcagaagcgtcacgtggagtttcttcagtcacaggtgcatcataatcccaataggggatagcatcgtctgttttaacgcgatccataatcatatcagctactttgatagcgaagttcaggaaagtactgtcgtttgtttcacggtagcaagctgtgtagccatatacagcccatgcttgaccacgtgcccatgaagaatcgtcattcttgccttggtgagtttgcttgcgttcaacagttccgtcgttgttgtagcttactacatgccagcaagtataatccggacggaagtgattgttcatggtagtcatagcatgcttgatagcaatgtctttgtatttattgtcacctgtcgcttttgctacattaaacagaagatcgaggttcatcatattgtcgataataaccgggaagttccatgttccgaaatcccatgaacggatagcgccgatagaatcgttgaaacggccgcagagattatcggcggtttctctcattacagcagcaatggtgtcgttgggtgaaagacgttctgcgttgccatagctgcagttgaccatgaatcccaaatcatgcgtacctttataatagcgtaccggattcagcagatttgtatattggatggcttgagttttcagtgtatcgtttcctgtcagttcgtatgcgtaccacaatgagccggggaagaaaccactcgtccagtcataaacgttgcagaggcgacgtttgcctagctggtcagcagtgggttgtgctcgtagtgaatctttgaatgttgatgaatctctttccaactgacggcaaaggaaatccatgtcataaccggtacggatggagcgtggcaacattcccgtaccactaacctcttctgcagaaagttgtaattgggcagaagctacatccagtcctttttttatccaactgtagtcttcctttgggggtgtctggcacgatgcaagtgcaatactaaccgaagcaaagagaacaagtttctttttcatgttattcattttaagtgattgtttttagaagttttgtaactgatacaaaagtagtggaaaggcttaactttgtgttgcaggattgtccaaaaggagtttgaactctgcttttcaagttttgattttgttgaaaaaggttttaattttctccaatatgccctaattagggcatattggagaggatttatggggatttttgttaccaaccaggattttgttcaaactgggtacataggtccttctcacgttgtggaataggcagtaactcgtgtttgtttttctctgtatatttatataacaggtatctgtaattatcagcagaatcccaccagttcgctaaggcagcgttcgttttttgtatggtttcataatagatgccccaacggactaagtccatgcggcgatgaccttcaaaagccaattcataagcacgctcttttctgaccgcttcacggaaactactttcatttaagtttgaaagatcacagcttcctgtattgctaggatatccatatccacgacgacgaacttcattaattgcggcataagcctctgtagtaggaccatgtttccattcgttcaaagcttcggcataaataagtaacacgtctgcataacgtaggaaataccaattagcatttgatttatcattattgataatgccacctgtcttttgatattttataaggtcccatttagctggtgtatagttttgtttctctttttgagcttgagtaggatcttgatcttttaattttgcagattcttccgtatcacttttacctttagcccacaacacataatcatcatcatacttatagttagctattgatatgtcacgacgtttgtcattcgcatttttaccatctctccaatcaagaacgaatgtatgaactactttcatatttccggcacaacttccccgtacaccggcgatagctgttgtttttactccgttccatttgccaatacgtcctacgggatctcctgaaccagatacagtaggagagtagaatgaaatctcaattaagctttctgtaggatcccatacactgctgcaagtgttttcccataatttttcgtaatcacgcaataatgagtgtttaccggattctatgaggatacgggctgtcttggcagcgtcttcccatttagcggtattttgtacaggatatcctgcccatgtagcatatacttttgccaagagaccaagtgctgctcctttactaaaacgatatgatgtgttatcgcgaagttgatcatcgacagcatacggtagtacttcactagcgtaaagaagatcgtcttcaataaattcatatactttgtcaggagtggcctgcgtataagtggtgggagcttgataagacatctctgtgttggtaatcagagggatatttccataacgacgtactaactcgaaatagaacatagctcttaacgctctggcttcggctatataaagcgttgctatttttttatcagtagcagtataactgtctatttttccactgatacgttccagaaaatcgtttgctctgtagatacctttataaagtacttgccatgtttgttgaatttctacttgggtagtaggaaaagcattattaacaatgatacgataattcgttatatcggagccttctccttgagatatatctgttcccatgttgaacaagaaagatagatgatacccgtatgcagcatcttcaacagttgtacgatatactcctaatagaacatcttgtgcttctttagcattagtcatgtaattcttcttttccatttcgcttcttgcctcttcatctaatgagcatgaataaggtaaaatgcacagaatggacatcgctatgtaatatattaatttcttcatattattttctcatattagaactgtaaatcaataccaaatgtaaatactctacttttaggataagcaccccaatccagtccgggggtcataggactcttgctagctgtacttacttccgggtcatatccactgtagttgttaagacagaaaagattttgtccggtagcatatatacgaagcttggatgcatgaaaactccgagtccatttatgaggaagtgtatatcctagcgtaatattcttcaaacgcaagaaagaaccatcttctacaaatcgtgaatacacatcatttactacgtatccgttatagctaggtactttgtttgaagcatttgtcggactccaacgatctgccacttctgctaattggtttctgcgttgtgtgttagtttgagttgcatacaaacgggttgcattataaatgtcattgccatagttaaattgcagcataaagctaaagtcaatacctttataattgaatgtattggtgataccaccataccatttaggcaaagcattaccgatcactgtacggtcttttgttgttatcactccatcaccatcttgatctttatatttcaccgcacctggagccaatctgtttccaagactaggattgctcgttacaccttcttttaagaccaaagtactggaacccggaacagaatagaaatcagaatattgatagatgccatcaaattcatatccgtaaatcagacccagagattgtccgacgatagccatataatcatatgatgtgaaattgctatcgaagccagaacgtgcttgcatataatttactccggatgccagtgactttaatgtatttctgataaatgatatattaaagttggtttgccaggtaaaattccgggtttgaatattggtgctgtttaaacttaattcgatacctttattttggatttttcctacgttttgcatttgtgagtcaaatcctgtaatatgtgccagtgattgtgacaataacaagtcttttgtatttttgataaagaattcagctgttacatttagacggttgtcgaagaagcctaagtcaatacctaagttggttgtgtttgaaccttcccatttcagattcttatttctgagttgtttcggatttaaaacagtaacgctactattacctatgccatatttatttgcttcatatagatccaaagaaagatagttaggaatattatcgtttcctacagtaccccaacctaaacgaattttgaaattagaaatccatttgacatctttcatgaatgcttcttctgatacacgccatgctgcagagaaagaagggaagaatccccatttcttatttgacgagaatacggtagaaccatcggcacgtacagttgccgtaaataaataacggttatcgtaattgtagttagtacgtgcataaaatgataataacgttttatcatagaaagtactttcaaccttacttggagttgcgcctaaccccatgttgtcatttcccatctgatcgaaagggaatcccattgcttcacccagcaaatactctgtgcttctgtaggatacttcatgacctaacaatacatcataattgtgtttctttaccttttgtttccaggttaaagtgttatagttagtccaacgtgcatcgcgttgcattgttgtccgtccataaggttgttcgccattacgatatgcttccttagaaccattcttgtagaatatgtcagtacggctattggttgtattatatgttccggcacttttaaaagtaagacctttgatgatttgccagctaacagatgcgtttcctgaccacatttcaccacgtttattgttagttacggattgggtttgcataacagggttaacctgtgccaaactttcacctgtctccaacatttccgggtcaatagcagaatgcaataattcttcatcggtcagtttattcccaccagtgggacgtgcgctaagaatttgagctaacatattgaaacgtccggaatctgctgttgttcctacacctttacgattggttaaagcatagttaatagtagcattgaatgatatatttttattgatcttctgatctatgcggaatttagctgttgttttgtcaaaaccgctgttgttaaagataccgttttctacataacgagaaaaagctgcattatattgtgtgtcattgctaccacctctaagagatatattatgatcttgtgaccaagtcgggttgaaagtttcttcctgccagtctaccccttttacacctacataatcttctagcgaatggtatctgataggttttccgttgtcgtcaaattctttgtcggagatatagctgtttaaaaggtcactattcacttcaccttgcagtttcacaaattcgtagggagataatacatctagcattttagatattttacggtaacttgcagaaccgttgtagctaatttgtggtctaccacttttccctgattttgttgtaatcatcacaactccattagctgcacgtgcaccatagatggcggaagatgaagcgtctttgagcacctcaacagattcaatatcagaatttgatatataatcaatatcgtccacttgaaaaccgtctacaatatagagagggcttgaatcacctgtcagacttcctacaccacgaatattaatgttgaatcccgcaccaggagtaccatctgtagaggtgatttgcactccggcaatttgtccgcctaatgcacctgctacagaactagtttggaaaccttcaatatctttggcggcaacagaagcaacagaacctgttaagtcgctacgtttcatcgcgccgtatccaacaactaccacttcatccaatgcttggttatccggaaccatttttatattaatggatccctggccattgaattttagctcttgtgttttataaccaatgtaagaaatggtaatggtagctcctttttttgcttttaaagtaaatttaccatcaaagtccgtaatagctcctgttgaggtgcctttagcttgtatcgttgctccgataagaggtgtatctgtttcgtctacaatgacaccttttaaagttaattcttgagcatatacgctgattgtgagcatcagtgctaagagagtaacccaccctcttatgcttattgatttaattagattgtttatgttatacataatttctatttttaacgtattagtatttagaagttaggatcgaaccagatgattagcgggaatacctgactacctttctgaggatctattccatttttatcgaaagtcatctggcctgtgaatacaccattaggatactctccgtccaaaacccatttgtttggattcaatttgagggcgagtccattagtcggatcaacatatcctatagcataacttaatgtgtttttatttttatctatattgctataataggaaatggcgtttctggaacctgtattaactcctctgccggaatcttctccgaatttagtccaaagtgtattcaagaagttggaagttttaggatcaccattagtaaatgtaccgctaattgccgtataattgaatgaacgtctatagtctaaagtgaacgatgataaagcttccgcatctatacctttaatagttggtttttcagaataagtgctgttgccaattgtttttggattaacctggaatacaaatgggttatataatacatgaacaccggctaccaccaagtcataatgtataaatacaggtacttccagtgagaattcagaatctttgtcttcaccaacagtggctgttacaaagaagaatcctgaaccgtttgtggctgctggctcttttgcgtctaatcctggccatatagcattggtaaatgagatcttaccattctcatctatttccaacttatcacagttccttccatttctgatgctccatcgtacattttttcctgtgatgtctgttgtaggagcaggtattgtgaatttacttagaatggtagtagcattagcagctttgtctactgtgattctaaattggttggcgttgctttcagcatctacgcctatattatttccgtagcgtataaaactgaacttattcggattattcttaaccttcaggttgaatgacgcttcttttgaatttttagtattagatgcagtgactgtaatgatatagtctccgtttggtatggtgtgacctttctttgcggatactactccatttttgtcaacagacaactgttgtcctaaatcatccttcaatgtgaacgtgataccatctccttcaagtccttcatcaggagttacttttaatggtgacgattcatatatttctacattagcaggatagctaaagtttgctacaggcacaattctgttgactactttgagagtgtatacattgttgaatgatactccatctgtagcatatttgtttgctacttttacagatataacatattcctgaccgatttcaaaaccgtgatgtttatctactgaaagtacacctgttgttgggtcaatcttaattttgtccgttgatggttcaatgctttcaatagaataggctatgttttccaaagagcctttcaacattggagtttcgcttttaaaagacgtttccggttcttctgctgtttcagcttctatcaatccttcgttaggttcataagtcaatcctaaaggtttggaggtaacgttgatagttaatgcgttctcaaaaatgccttcgtcttcagacgatgcgcctgtagtgagttttaatgcaagagtatgtattcccggtgcaatatcacttcctctcacaatcgttatttctcctgtttgagagatattgaagaatgaagaaatatcacttttggcaattgcatatttggtaatggatacatgatttccatcagtttttacttgtgcagtaggtaattcttccgtgctttttgcgtctgaaacaatactgtattctatttggatctcattaggttctacagtaataccatctggtacaggtttcatcatgtttacttctacaatattcttatattcatgataagaaccgccggccatacatgaaatggatattttatatgaacctaccggggtgtcctttgcgctgttgatttcaatagcaccggtttctttattgataataaaatcactacccgtataagcctcgccatttaatgtgatacctgtgattgtaaaatcagacggaacgcttcctttgtaagaaggttctgaaattatcccactcatcgatggacctatatcggtcatgcccaaataataaagtgcaaaatctgtagtgtcagtggtatcctcatctgaacaggatgtataagtcataactagtacaactgccatcaagacacctaaaaaatgcgaaatgtcttttagtaatttagatttcatattatatgattgttagatttattttgaagaaagatcgtatactgtacctttgactgttacttgaatagatacaccttccgaatggaatgttccagctgtcccatcttcattgtcagtgaatttggcatcaactttcagctcttcccgttccgttgcgctctcaaatgggcaaagaattgtgatataacgggttgcactgatttcgataggggtaattttaggctgacgaagagtaatttggtagcctagacgtataggaccatcttctttatcagtgtttgtagatactatattggtcacatctgttgaagataatgctttagctgtcagatcttgactcgtttctgtaaatgtggcagcgagaatgttattactatcaaaattggtatatgcttgataatacttattgctgtttacagatgtttgcagattcttgtcgaatacagaaggggtatctttatcactaagcagatggaagtttatatttgtttttgttccaagtgtggaggctccataaccttcgtctacaataacaaagaacgttctattatttacaaagaagacggttctacgatgggttatgtcatctgattgttggttttccgtaactaaaatgtctacattgtttttagttgttaacttaatcattttcccttccattacgccaccttgtccggttggcttagcaactccaatagtcttactcataatagtcatagtattatggttgacagtcgaagcatatttgctacgggcagctcctgtgttataggtgaatacacctgcgtccgggaagaaattacgttctttgcgatacaaaccgaaagttccattatcgggctgacaatgccattgattggtcggattgtagttgttctttaaaatcatcatggttgcatctttatcccaaccgttacgtagcatgtaatagccagaagtgctgtaagccttagttgtatatgaaggtttacttccgctttttccttctgtagctacccataataatccattatcgtcaggatacatagccgaatactcctttagtctattcaataacgtacttttagcatacgaagctgaacgggtatcattgaaattgtctatggtataattagggtaaatcatatccataacaaattctgtcgctttctttaatttactaatataactaggagacaataaatttgtcttgttattggcttgggctataaggtatatttcgcgaaagtcgctaatggcagcagtgtgatagctgaaatccaactcatattctaccccgtcatcattaaattgtgtatctaatgattcgtttaagccctgtgttccttctgtagcccatgtggatgcattcttaaattctggcattaatataccagcagtggctacggcttgatattgagaaatcaagatattgccgctttgataataattcaatcgaatacactctacctctttttcaaacgcaaccaggaaagttgaaagccattctggtgtgaaatttgtagaatgaatgaaataaggcatgatgtctacttgagagaggactctttctgctacctgcaagcctttccattgatagtctacatcattttctgaaccacctgccggcggaaatactgttccgggagtgtatgggaatgtttctatccagctgccatacgcttcaatccatgattgaatgtatttctcatctttactaatacggtatgcttttgcttgaggaagcatccattgatgacgatgaagctggtatctgaactcttgctctttcttctgcttgtcttcgttggcactccaatctattttttttgcagatgcatcgtagaaagaataatatgtttctaatttggttgcttcatctacactttcggcgaatccttttacatagaaacgatgctcaagcgcttgatcggcaattcgctgatctttttcagaaatagtggggttaatcaagttgacgctagggttatttacgtccactcttgttctataatactctagtaattcgttagctgcataatagtattctccgctttcatagaattttttcactttctctaatcctgggtaatcgaggttaatgatctcaaataactttgagtcgactacttcattcggtttattttcaggaagtatttctactcctggactaacttcaccagttaataagtcatcatcatcatctacgcatccggtaaaagcaacggttgcgaacatacaaataaagaagatgttcttcatactttattaggttttaattattaaaagttatattttactgtttgcaaaaatagcttattaaattatagtctattatctagcttgttcacactttgttcaaaaatgatttttttgatattaaatttgttgaatcatatattatttctgtctaaaaagtctgttacatacctgatatcaggctttttatatatcataatgtaatctaatccaattgtatttgtagggttggttttgtacatttttaggcattctattggatgaattttagtccataatgattttgggaatcatgctggatcggagaaataacaaagtccaggtctttcattttgtataatgaattcgctaaatgtatatagaaagaccatatctttttccttaataatgcggaagtattatggaactctatcagatcatttaagtaactcatcatatacttttggttacttcttctaatgtaattagtggaatgcagttgagcaactagtgagttgcacttgtacaactatcaagaaggataagtgtaacttatcggttgcataactgtaatctatcaattggatcttagtaataaaactctttaattggattgataaatagggtactataagaataatgcacttttcattcagaaaaagccaatagcgttctattattttttgtaaacttatctaaaataccgcctttggagaaagataatatgttgattataagctctgccacatttttgtatctctcccttataatacttaaaatagatacaaaaatgtggcaagttacaaggacgttttctatggtgaaatagtattcccaatacatcttctcctaacagttatattgttttaatcaggactatcaattatccctttgccttcttaatatactctgtaggcaaacatccgaaatactttttgaaactcgtagcaaagtaagacggcgtattaaatcctaccattgtgctgacttctgctattgtataacggccatccttcagtagttttgccgcttcattgaaacgaatcttgcgtataaagtcgatagtcgattcacctgtgatggctttcaatttgaggtgcagattagaacggctcatattcatttctctggcgaactcgtcggtagagaattcaatattatccatattcttttctacgatggctacggcacgtttcaataaagcttcatccatggcgttgaacgtaatcttttccggttccacttccagagatttagaataccgttcaagcatacgcctgcgggtacgcatcatattctgtattttcgtagtcaggatagctagcgagaacggtttcgggatataatcatccgcgcccatttgcagaccttccatctgatctttggtttcgcttttggcagacaggataatcacaggaatgtgacaggtacggatattctgcttcacattcttgcatagcttgataccatccatcacaggcatcatgacatcagtcacaataatgtccacttcattctctttcagcttttccagggcttcttcaccatttccggcttccagtgtattgaaaagttcggcaagtccgctacttagataatggcggatttcattattgtcttctacgataagaatcgtaccacgtttcttgtcaccagtttcgatcgtttcgttttctactttttccgtatcaatgaaatacatctctttcgagttggtagaataaacttggtcctcctcatttttagcgtcattagaagctaattcggaagatttatagatatttatatcctgtggcagataaacagagaaagtactgcctttgccttcttcactgtctaactcaatacgtccgtgatgcagttccaccaaacgttgtaccagtgacagcccgataccacttcctacgtgctcactctctatctgatagaaacgttcgaatattttcccctgcttgttgataggaataccaataccggtatcactaacttgcagtaccagccaattgttttcctctttcaacgtaacagtaatgctttgcccgctttctgtatatttgaaagcatttgaaagcaggttattaacgatcagttccagataattcggatcgaaaagttcctctttttcttccagttcggagtggagagtataagtaatcttcttgtggcgtgccagtttatcgtagaacaagaaattatcctgtatcagttgatgcgcattctctttctttactttcagctcgaaaactcccaattcggcacggcgataatccatcaactggttgacaagatgcaacagacgattggcgttgcgttggatatattccagttggttacgagtccagcgatcactaatcttattgattatttcttgtaaaggagctaagatgagagttaatggcgtgcgaagctcgtgcgaaatattgatgaagaaacgcatcttcatctggttgatttcttcttgatgctccttgtccctgcgttcaagttccagttccgcttccatactcttacgcatccagaagaagcggaagacgaaagtgataaacccgataaaagtggcgaggaaaatcatgattgcccaccaggtcttgtaccagatagggagaactatgatttccaacattgtaggtacagtattccattttccgtcactattggcagcttttaccaaaaagtgataagtgccttgtggtaggttggagtaggagacagtacgtttatctgtcagataataccactctttgtcatatccttccagtttataagcgaaagtgttatgttgtccggaaatataattggatactacaaattcaatcgtgaaagcagtttgccatgatttcagggtgatactttctgtctcattgatattcttagtcaggataccggtttcatcatccgggcgaactgtcttgttaaacagttgaagtttagtgataactaccggaggcgtataagggttatccagcaacagttccgggcggaaagtagtgatcccgttgatacctccgaaatacatctgaccgctcgaagtgcgacagaacgaagaagtattaaactgattactctgtaatccgtcggattccgtaaaattacggaacctctctgtttccggattgaaacaggaaataccacgattggtacttacccaaagacgtccgaaagtatcttccagaataccatataccacattattaggcaaaccgttagccgtagtatatcgtttgattttcttttctttctcattaaaacagtagaagccttcacgcgtacctacccaaatgataccgttggcagcctcgtaaatgcaattggtaaacgtctttgttacagatgattccggcagaataggcaccttttctatctcgattccttcctgctgaaagacagatataccttcctcacccccgacccaaagccgtttatgggaatctctgaacaggattgtgattcgttgtgaagtaaatggagtaccgtccttttccttatcaatggtggtaaaactctttttttccgggttaaaactaaccagagcacttaatgtccccaataagagattccctcctttgtcaggaagaatagcatatacattctcattcaccaactggctgttcagctgattgaaactttccatttttccactgtttcgatggaggacagtcagtccgccggcatgtgtccctatatatacaagtgatttttgttcatctacatatacggctttgatattgttggaaccaataccgatttcccgttcgtcttcctgtaagatatagtgcgtaaactgttgtgtctttgtattatacagattcaaaccaccatcattcgttcctatccataagttcttatccttatcttccgtaatgcagctgactacgttatcgcttagagaattcttatagggaatacgctggatattcttgaatctgttgcggataggatggtaatagttcaatcccccgaagtaggttccaagccacatacctccttgcgaatccataaagatactgcgaaccgaacgttgtgacaaactgccgttttctaccggactgctactgtaggaaacgaaagaatcgcttccttcatgataaatgtttagatcattgaacgttcctatccataagcgattttgcgaatccagtgccagggagcggatataattggaactgatacttttaggattggaagaagaatgatgataagccttgacctctttcgttttcggattgagcagaagcagaccggctccttcggtagctacccatatacgggtaggagattgctgcaaaatggcctgaatctgtttcgtttccgttatcggagtaattttttccagtttcttttgaggaatggaatagctgtaaagcccgtcaaccggggtaccgatatagataatatccccctgtctgtaaagagctgaagctataagcttgtgcatagcggtactaaaagaatcatcaacgaatcgtgattctttaatatcgaacatagtcagaccttcttgtgtgcttataagcaactgttccggtgagatttctgcaataccattgatttgttgccgtttgccttttttctcgtagaagaaatttctgaatttgtctttttcttcgtcataatatgacaaaccatcccgcgtaccgatccagacacgtccctgactgtcagtttttacgattcgtgaaatgtcattagcaatactgttcggatcctcttcattatgttgataaactgtaaatgaatacccgtcatacttgtttactccatcataggtcgcgaaccacatattacctctttggtcctgatcgatagaaaatacggtgctttgtgacaatccttcgttaatagaaatataagagaagttaatttgctccggaacttcagaaaaaacgcaattaacccctatacatagaaagagtagacagattgttgtttttttaaggctgttcattattagttcataagattaataatggcatcaaagatagcaaaatcttttatatggaggtattcaatagagagaaagtaaatatagggaatgaaaaaataccaccgattatacagattagcacggatttttatatcgacaatcttcgaattacaattaaatctgtgttaatctgtgtaatcggtggtgaaacttgaaactggtaggtaatttattatttagctaaatctcctatctcgtctaaattcttctgaatatcttcgtcattcaatgtataattcaccagatcacctgccaaatacttgtcataagaagccatatcgatcagaccatgtcccgaaagattgaacagaatcactttttcttctccggtttccttgcatttgttagcttcgcggatagccgctgcaatagcgtggctggattcgggagccggaataataccttcagactgcgcaaacagacaaccggcttcgaaagactccagttgctgtatatctaccgcttccatcagattatctttgagcaactgtgaaacgattacacctgcgccgtgataacgaagcccaccagcatggatatgagcaggagcaaaattatgtcccaaagtgaacatcggcagcaatggagtatatccggcttcatcaccgaagtcatattggaacttaccacgtgtcagtttcggacaagaagcaggttcggcagcaacgaaacgagtctttttcccttcctgtatggtgtggcgcatgaacgggaaagagatacctccgaagttggaaccacctccgaaacaaccgatcacgatatccggatattcgcctgccatttccatttgtttttcagcttccagtccgataatagtctggtggagagtcacgtggctaagtacggaaccgagcgtatatttacagttgggagtcatttgtgccagttcgatagcttccgaaatagcagttcccaatgaaccttgataagtggggtgtttagtcagaatatctttaccggcgcgggtagacatagatggagaaggagtgacctgtgctccgaaagtttgcatgatgctgcggcggtatggtttttgttcataactgatttttacctgataaacggcagcttccaggccgaaaaccttggctgcgtaagaaagagcggctccccattgtccggcaccagtttcagtggtaatgttggtaactccttcttctttacaataataagcttgtgccaatgcagagttcaacttatgcgaaccgatagggcttacgctttcgttcttaaaatagatatgagccggagtgccgagtgctttttccaaaccataagcacgaaccagcggagtgctgcggtagtacttgtacatttcacgcacttcttccggtatttcgatccatgcatccgtctgatttagctcctgatgacacagctcttttgcgaaaatcggatataaatcttctgctttcagcggttgtttggttcccgggtgcaacggaggcataggcttgttcaccatatcggcctgaatgttgtaccagtaatgtggaatttcttcttccggtagaatataccgttttcttttttcactcataatattgtagttttttagttttctgttgccaaaagtagtcaaatttttaatattcagaaaattttgtcaacaaagaatcgtgtttgattgttattttagttaagtttgcacgaccccgttaaaaaagatgatatgaagatttatcataagtttttattgtatcagaataaactcctaaaaccctatgtacgtattttgttagggctgatagaagcactcacttatctggcgtctttatcattgattgtcggagtagtatatgaacatggctttcccttgtctattgatgaagtggcgaatttgcagacattgtataaaactgtctggatcatttttctgattgatgtaactttacatatctcgctggaataccggaatactaaaaagcaataccggcgattagcctggatattgagtggattgttatatctcacgttggtacctgttatattccatcgtccggaagaagaaggagctattttgcatatttgggaattcttacatgggaagttttatcatcttctgttattgttagttctttctttcctcaatctgtccaatgggctggtgcgtctgttgggacggcgtaccaatccgtctttgatattggcagttagttttatggctattattctgattggagcaggcttgttgatgcttccgcgctgcacggtaaatggtatcacctgggtagactctttatttacggctaccagtgccgtatgcgttacgggcttggtaccggtagacgtgtctactacattcaccacttcgggattagttgtcattatcctgctgattcagattggcggattgggagtgatgacattaaccagtttcttcgccatgttcttcatggggaatacttccatctacaatcagcttgttgtgcgtgatatggttagttccaattcattaggttctttgctgtctactttattatatatattaggcttcaccttagtgattgaagggatcggcatggtttcgatttggtttagtattcacggaacgttgggaatgactctggaaggagagttgggttttgctgctttccattctatttcggctttttgcaatgcgggcttttctacgctttccggcaatttaggaaatccgatggtgatgactaaccacaattggctgtttattaccgtttctctattgattatatttggtggtatcggtttccccatccttgtcaatttcaaggatattgtattgtatcacctccgtcgtttctggaaattgattcgtacccgcaaactggaccggcataaaatgcagcacctctataacctgaatacgaaaatcgtgttaatcatgacttttctgcttttattaatcggcacattggctattgctgcttttgagtggaatggttcttttgccggtatgcctgtggcagataagtggacacaagctttctttaatgccacttgtccgcgaacagccggtttcagcagtgtcgacctggcatcattgagcgtgcagacattgttggtttatctattcctgatgtgggtgggcggtggatcacagtccacggcaggtggtgtgaaagtaaatgcttttgcggtcgtagttctgaatcttgtagccgtattgcgtggcactgaacgagtggaagtgttcggcagggaattgtcttacgattcaattcggcgttccaatgcaacagtagtcatgtcattgggagtcttattcatttttatttttacattgagcatactcgaaccgggtgtttccattatggcattgactttcgaatgtgtctctgcgcttagtaccgtaggttccagtctgaatctgacccctcatttgtgcgacgcaagcaaactattggtgtctttgttgatgtttattggtcgtgtggggttaataacattgatgttgggaatcgtcaaacagaaaaagaatacaaaataccgttatccaagtgataacatcataataaactaaagctatgaagtatattattattggtttaggaaattacggccatgtgttggcggaagaactgtccgccttgggacacgaaattataggtgcggatataagcgaaagtcgtgtagactccatcaaagataaggttgctacagcttttgtcattgatgccactgacgaacaatcattatcagtgttgccattgaatagtgtggatatagttattgtagcgattggagagaattttggtgcgtcgatacgagtcgttgccctgttgaagcagaaaaaggttccccgtatttttgcccgtgctattgatgctgtacataaagcagtgcttgaagcttttgatctggaacgaatcctgactccggaagaagatgctgcccgcagcctggtacaactgctcgacttcggtactaacatggaaggattccgcatcgatcaggattattatgtggtgaagttcacggttccggagaaatttgtaggatattttgtgaatgagttaaacctggatgaagagtttcatttaaaaatgataggcttgaaacgggcgaataaggtcaccaactgcctgggtatctctctgaccgagcttcatgtgaagaatgaattaccggaaaatgagaaagtggaagaaggagacgaattggtctgctacggcaggtatcgtgattttcaggccttctggaaagctatttagctagagtacttataacgtcgcttttattgagcacaagtgagcaagtttcagagatagttgtatgaagaaacccatcggacttcttttcagtgaagaaatccggtgggtttgttatatgctgaagcgtatgccttatttcgtctgaatacgaatatttccggctttcactccgtttgcttttgctgtaaacacaatctctccgacagtttcaccggcttgcagaatagctgtcaacataccgttgaaagcatgcattttcggaagatggaattgttcaaggttcgtcggatcaccattggcggcagcacgatatttacccgttccctttaccgagaaatttatctgacgattatcggcagggcagaggttaccgtctttgtctactactttaacagtcacataagccaagtcttttccatctgcagtcagttcgttacggttgcttaccagttcgatgtgatgaggctttccggcagtacggactactttttcagctaccgcttttccgtttttgtcgtaggctactactttcacttcacccggttcgtactttgtatccatccacatcagacgatagcggttctttagcgaactattattcttgctttgttttccataacttttgccattgataaacaattcggcagtaggataattagtgtacacaaaaacgggagtcacttcaccttcacgtcccggccaggtccagtgaggcaggatatgcaaagtttccgcttccttgttccacacgctacggtaaagataatagcggtctttaggtaaactggcaaggtcgatgataccaaacattgaactgtggttaggccatgaatccgtatcgtatggtgacggctcacccagataatcaaatccggtccatacgaactgtccgatggtccaatgatgatcgtcagctaatgcaaagtcctcgtccggaatattcgaccagggacaaacctccacatcgtatgaagagcattgatgatcttcatattttgcccctttcttatcttccaccgggaacttgtatacgccacgtgaactgacagtagaagccgtttcgcttcccagaatcagattctgcgggagttggtcgtatgactcctgatagcgttgcgtacggtaattaagtcccggaatgtcaaccattgctgcaaatccgttggcaagtacacaagtcacctggtccattccgcaagtgacaggacgggtaggatcttcacgatggcagatatcctgcaggaatttggccactttataaccgacaggactgcattgagtcggtacttcgttgccgatactccacataacgacgcaagggttgttccggtaattatgaagcatatttatcatatcacgttccgcccattcatcgaagtagcggtgataaccattttcacatttggcgatatcccattcatcgaacggttcgatcatcatcataaatcccatttcgtcacacaacgcaacgagttcgggagtcggcatattatgagaagtacggatcgcgtcgcatcccatatctttcaatagcgtaagctgatgacgcagtgctgctacattgatagcggcgcccaacggacctaaatcgtggtgattgcatacaccctgaaatttgcggtgctccccgttcaggtagaatcctttgtcggcaatgtattcaatgctgcggataccgaaacgtgtggtgtaagtatctaccagtttatcatccgcataaattttagagacagccttgtaaagcgacggactttccggcgaccagagttcgggcgcgtttacaataaaattttgttcaaaaggttgtccgtgattgatgcggcttgtattctctttccgggtaacaactttaccttccggagaaagaatttccgtctctacacggatggctgttttctcaccggcattgtctatcttcgtttggagacgtacggctgcaaaatccttgttgacgtgaggagtcgtgatttgcgttccccatacaggcacatggattttgtcagtcacaatcaggtgtacattgcgatatagacctgctcccggataccagcgcgaagattgcggacggttttccaaacgcacggcaagcgtattgtttttaccgtttttattcaataaggaagtcacattacagtgaaaagaattgtagccgaaaggccagaaacaagcttcttttccgttgatgtagacacgcgcttcactcatggcaccgtcaaagagcagtgtcacttctttgtcggcaggggcgtcaaaactggtacgataccatccggtacctacataaggaagaccgccggtacgtcctgtcttcaaggaagcttttttctcaaagttctgtgtcactgccacattctgaagatcattgttcatgtcgaatggaccaaaaatcgcccagtcgtgtggaataacaaccgattcccatttagtgtcattgaactccggctgactggcctctttaaaatctcctttactgaatttccagttcttctccagcagtgcctcactgcgttgcgcttgcatagtgcaggcggcggccatcaaaagtacagctaataactgtttggggtgtttcatgttcatttttacttttcaggtataaaatattttggattcggcgtaaagttataaaaaaggattcaataatcttatctcttgaaagcattaaatgcactggccggtttgccactgttgtcaagcccccctttgtgatagcctttccattccttctttccttcaaatgtaggaaaaatgtcggttacacttgtaaatatcccgctctttttgttcctttgccatctatttataaacagaaaacttacgtatgagaaaactaatttatttgcttttgttgccgttggcggtggctgtgactgcatgtggcggtaaaaaaggatcttcagataatcagtcgctgctggcaagaatagacagtatagatgctcacggattgcagcgtatgcagacgtctaagagcgaaactaactttaaattcaaaggaaaagattatcattcctttgtttcacgtactccggacgaaagtctgcctcatgtaacaaatgagatgggagatacttatgtcgataataaaatagtgctgcacctgacacgcggtaacgaaacggtattgaacaagacatttaccaagaatgatttttcatccgtagtcgatgcaaaatttctctcgaaatctatattggaaggaattgtatacgacaagaccactccgcagggcattgtatatgccgcaagtgtttgttatccgcagacagatttgtatatgccgctttctataacgatcactgctgatggaaaaatgagcatacagaaagtcgatatgcttgaagaagatttgaacgatgaagcacccaattaagcctccaggcaggtgttgacagcaaaattacacaaatgtgaaaacatttgagacaaacgaaaggcaaccgatgaggttgcctttcgtatttttgcaccgtcaacaaacttaatatcgaatagaatgaagaaaagcatttttattatttgcgtgctggcatcaggatgcacggcgatggctgaacaagtcgagaaacccggtccggctatagaaacacagactttggtgccactgaccgagcgtgtaaatgtacaggcagattcggcatgtgtcaatcagattatagatggttgctgggtagcagtcggagctaaaaaagcgcatgccattcaacgtgatttcaaccttatgttcaacggaaaaccttcttatcgttttgaactgaaagaagatgataacacattatccggatatgcagcgggggaaacaaaagggcgtgcggaattttcttattgttatgcaacttccgatgatttcaaaggcaaaccagccgatacatataagaaagcacaaataatgaaaactgtatatcatcatggaaaaggtatttgtccgcaaggtgcttcccgcgattatgagttttcggtatatatcccttctacattaggcagtgatgtttccaccatttttgctcaatggcatggaatgccggatcgtactttggtacagactccacagggtgaagtgaagaaactgacagctgatgagttcatggaactggacaagactactatttttaagaaaaacatgggatacgaaaagaaacccaagctggacaagcaaggtaatccggtgaaagacaaacaaggcaatcccgtttatcaagccggaaaggccaacggatggctggtggaacaaggtggctatcctccattggcattcggattttcaggcggatggttttacatcaaagcaaattccgaccgtaaatggctgactgataaagacgaccgttgcaacgcaaatccggaaaagacaccggttatgaaacctgtgacatctacatataaagcatcgaccattgcttacaaaatgcctttcgccgattttccgaaagattgttggattacattccgtattcatatcgattggacagtctatggcaaagaggcggaaacaattgtaaagccgggtatgctcgatgtacagatggactatcaggaaaaagggaaaaaggttaataaacacattgtagacaatgagaaaatcatgattggacgtaacgacgatgatggttattactttaagttcggtatctaccgcgtaggtaatagcacgaagccggtatgttacaatctggcaaactattcagagaggtaattagtcagaaggtagaaagagagtgatatccggatgtccgtttagtgggcatccggatatttttttataggttaataatctgaaaaaataatatcgcatttgtcaagtgtgcttcaattctgcaaaaagatttgtttttttgttgcttgccaaatggtataatatataaaattattagtgatgcaaatgatgaacaaaaatggatttaaccggtgtgcggaattctacatcggtcgtttgcggaaggagggacggtattctacggcgcatgtctacaagaatgccctcttttctttcagcaaattttgcggcacgtctaatgtgtcgttcagacagatcacccgtgaacgtttacgacgttacggccagtatctttatgagtgtggcttgaagcccaatacgatttctacgtacatgcgtatgcttcgtagtatttataaccgtggagtggaagcgggcagtgcgccatacgttccgcgactgtttcatgatgtctatacaggtgtggatgtccgccagaaaaaggctttgcctgctacggaattgtataagcttctgtatgaggatcccaaatcggaacgtttacgtcgtacgcaagctattgccgccctgatgttccagttttgcggaatgtcattcgctgatttagcccatctggagaaatcggcactcgatcagaatgtgttgcgatacaatcgtatcaaaactaaaactccaatgagcgtggaagtgctgaatacggcaaaggaaatgattaaccagctccgtagcaaagaagattctcatcctgactgtccggattatctgtttgatattcttcgtggggataaaaaacggacggatgaaagaggttaccgggaatatcagtccgctctccgtcgatttaataattctctgaaggacctggcaagaaccttgcatttgcaatctcccgtcacttcctatacgcttcgtcattcttgggcaacgactgcgaagtatcggggagtctccattgaaatgattagtgaatcattggggcacaaatctataaaaacgacacaaatctacttgaaaggctttggactaaaagaacgtacggaagtaaataaagggaatttatcttacgttagaaattgctgtgtaagtggtgatagaatagtaaagtgttgataattagaattaaactatgtgtgttacttcttaggtaacggaattaaatttgacgcaaagatagacaaaaacacgaatagaaagcaaatattcctccactttttttcgttttatctgaaacatagagcaaaaaactatccgaacatgaaataaccttatttccatgctctatactttttattgcctaatctctagatttttcccgttgagtattaggcctttccacattctacgcctttgtcatgtgcgtgatttctattttcatcataatgtacgtttcgtgtatgtgttatccgttacctaagaagtaacggaatcacatggggtaaaaaaatatgattttaacgaaaccaaaatcagtaaatgccgggcctattagtgggacaggggaaggcgtagcacactcaaaacgctggtatgtagcactcgttcgaatgcatcatgagaagaaagttgccgagcgtttgtctaagatgggaattgattcttttgttcccgttcagcaacagatccatcaatggagcgaccgtcgaaagatggttgatacagtcttgcttcccatgatggtttttgttcatgtcaatccaaaagagcgtatggaagtcctaagcttctccacggttagccgttatatggtgatgcgtggtgaaagcactcctgccgttattcctgacgagcagatggcccgtttccgtttcatgctcgattattccgaagaagcagtctgtatgaatgatactccactggcgcgtggtgagaaagttcgtgtcataaaaggtcctttgagtggtcttgttggcgaactcgtgactgtcgggggtaagagtaagattgccgttcgtttaaatatgcttggctgtgcttgtgtagatatgccaatcggttatgtagaacccacaaagattagtaatgacgacacaaaaaaactttaacgtatttctattcattctactgttaggagttttttctcctttgatggctcaaaatatgagcgattctcaagtgttggagtatgtcaaagaggggattagacaagggaaagaacaaaaacaattagcctccgaacttgcccgtaagggcgtgaccaaagaacaggctatgcgtgtgaagcagctttatgagcagcagaataatgtcaatgcttccaacgctaccggtacggatgtcaatgaatcccgtcttcgtgaagaaatgaaggagaatacttccgatatgttggaagaccatccgagcactcaagaccttgcacgtggtaatcaggttttcggaagaaacatcttcaatactcgtaacctgacttttgaacccagtgtcaacatcgccacccctttaaattaccgtctcggtcccggtgacgaagtgattatcgacatctggggagccagtcagaacactatccgccaacagatttctcctgatggcactatcaatattcagaaaataggtcctgtcaacctgaacggactaaccatttctgaagccaatgactatctcaaaaaaacattaaacaagatatataatggtcttaataatacgaatgaccccacttctgacatccgtctgactctgggcagcatccgtactattcaaatcaatgtaatgggtgaagttgtccagccgggcacttactctctttcttccttttctactgtattccatgcactttatcgtgcaggaggtgtgagtgacataggtagccttcgtaatgtccagctggtacgtaacggtaagaacatcgccacaatcgacgtctaccaatttatcatgaaaggcaacattcaggatgacattcgtctgcaggaaggtgatgttgtgattgttcccgcctatgacgtattggttaagatcgacggaaaagtgaaacgccccatgcgtttcgaaatgaagaaggacgaaaacttatctacacttatcagttatgccggtggatttgacgctgacgcctacacccgttctttgcgtgtcgtacgccaaaacggacaggagtatgaagtaaacacagtcaaagaccttgattatagtgtctataaaatgcggaatggtgatgttgtgactgccgaggctatccttaaccgtttcactaataagcttgaaatccgtggtgctgtttaccgtcccggtatctaccagctaaacggtaaactgaataccgtccgcgaactggtgaacgaagcccaaggcttgacgggtgatgctttcttgaaccgtgctgtcctttatcgtcaacgtgaggaccttactactgaagttatccctgttgacattaaagccatcatggatggtacttcccaaaatatcatcctggcgaaaaacgacattctttatattcctagtatccatgatttggaagataggggagatgttgtaatccacggcgaagtagccaaaccagattcctatccttatgcggataatatgactcttgaagacttgatcattcaggccggaggcttgcgtgaagccgcttctgttgttcgtgtggatgtatcccgtagaattaagaatccccgtagtacagtagataacgatactattggtcagatatatacattctccctgaaagaaggctttgtcgtcgacggcacaccgggtttcgtacttcaaccttatgatgaggtctatgtacgtcgtagtccgggttatcaggctcaacagaatgtggttgttgaaggtgaaatcctgttcggaggctcatacgccatgaccaatcgtgaagaacgcctttcagatttgatcaataaagctggaggtgctacgaattatgcttacttacgcggtgccaagttgactcgtgtcgctactgaaggtgagaagaaacgtatgggagatgtgatccgtttgatgagccgacagttgggtgaggctatgatggactctttgggtgttcgtgtggaagatacttttagtgttggcattgacttggagaaagcattagctaatcctggcagtacagcggatattgtcttgcgtgagggtgatgtgatttctattccgaagaacaataatacagttacgatcaatggtgctgtgatggttcctaatacggtttcttatatagaaggacagaaagttgattattatctggatcaagctggtggctattctgaaaatgcgaagaagagcaagaagttcattgtttatatgaatggtcaggtaactaaggtaaaaggtagcggtaagaaacagattgaaccgggttgcgagataattgtacctagtaaggcaaagaaaaggactaatattggcaacattttaggttatgctactacattcagtactttgggaatgatggttgcttctatcgctaatttaatcaagaaataacgaatacctttatttatgtctactttgatggaacaaacatctgaaaaggaaacaaaacaggtgtataataatcacaatgacgaggagcttgaaatcgatttgatggatcttcttcgtaaggttataggtattcgtaagaagatctataaagcggccggtatcggactgataattggtgttattgttgcgataagtatccctaagcagtatacggttgaagttactctttctccggaaatgggtaataacaaaggtggtggtttatccggtttggctgcttcctttttaggaagtggagtttctatgggagatggaaccgatgccttgaatgcttccttatctgcagatatcgtctcttctactccctttttgttggaactttctaatatgaaagtccctgtatcagggagtgaggaaatctctttaagttcttatttagatgaagaatcttctccctggtggagttatgtaatcgggtttcctggtatggtaattggcggagtaaagtctttgtttatcgaagatgaggatgaatctattttttcggataaagcgagtcaaggtaccattgaattatccaaaaaggaatctcagaagattgaatcactaaagaaaaagattgtcgcttctgtggataagaaaacttcaatgacttccgttactgcaacttttcaggattctaaagttgctgcagttgttgctgactctgtagttaagaagttgcaggaatatatcatagactatcgtacctccaaatctaaagaggattgtctctatttggagaaattgtttaaagaacgtcagcaggaatattacgaagcgcagagaaaatatgccgattatatggactctcatgacaatatcattttgcagagtgttcgtaccgagcaggaacgtttgcagaatgacatgagtttggcttaccaggtatatagtcaggttgccggtcagcttcaggttgccagagctaaagttcaggaggagaagcctgtttttgctgttgtagagcctgcagttgtaccattatatccttcgggaaccagtaggaaagtatatgttttagtttttgttttcctatcagtttgtattgtaatctcttggaatttgttcgggaaagaccttctgagcaagttcaaagaagtatgtgcctaaaatcaatttttaatgtgatatggtatcaaccaccagtcaaatcaataaatttatagaatttatagcagttctgggagatctgatcattctgaatttggtattgttctttctccttttcttttgggaagaagtatttgtctctttacctttttcttgtagggtttcctggatgatgacttcgttaagtctctgttatctggcctgttccggttctcgtgggagggtttgggatagtcggggaattcgccctgaccaacttgtgttgcgcgtgttgaagaatactatagctttttccatcttttgggcatgtatcatgacttttagtggaatctctatctattctccttttttctttgttgcatatttctcttttctctttgttatcttaagtatttatcgcattatcatccgtcattttctgatagtttattgtgctaagggcaagcatagacgttatgctgtttttataggtggaggcaataatatgcaggtgttgtatgaggagatggaaagttctctggcgtcttccctatatgaagtcgtgggttattttgatataaaaccgaatgatgctctttcttctcaatgttcctatttgggtaatcctgacggtttttcagattttatgtctgcacatccaagcatcaagcatgttttttgttctctatcgatggaggagggacgttacaatttttctatcatgaattattgtgaaaaccatttgctttattttcacggtgttcctaatgtatgtaaaggttttccgcgtcgtatctggcacagtatggttggcaatatgcctatcttgaatctgcgttatgaacctttgggtaagatggagaaccgtatgttgaaacggatgtttgatgttgttttctccggtttttttctggttacagtttttccctttgtttatctcatagtgggaagtattataaagttgacttctcccggtcctgtattctttaagcaaatgcgtacggggttgaatggtgtggattttgtgtgttataaattccgttctatgaaagtgaatgatgaagctgacagtaaacaggctacggctgatgatcctcgtaaaactcggtttgggaacttccttcgtcgttctaatattgacgaacttccccagtttatcaatgtttttaggggtgatatgtcaatagtgggaccacgtccacacatgttggctcatacggagacttatgcccgtttgattgataagtatatggtgcggcactttataaaacctggagtaaccggctgggctcaaacacatggttttcgtggtgaaacgagagaactctcacagatggaggaacgtgttaaagctgatatttggtatatggagcattggacaatgctacttgatatatatatcatttataagactatagcaaatgtagttgttggagaaaagaatgcatattaagataaggaatggattaaaattgagcagatacagatatcaatttctcaatgttgatataatatagctaatgaaatctttagctttaagaaagtgtattaacgaaggaaatattgtaattaattattagggaatgactaatcaatcagtacacttttagttatcttaagctgaaaaggttggatagttaaataatgtgcacttaatattatagaggactatgcgaagtttacatattatcatgccaatggcaggtgagggaacacgttttcttaaagaaggttggactacaccaaagccattgattgaattgaaggggatacctttgttcgttagagctattaggagcgtaattatggacgatataaatttgaagtattcatttattgttcgtcaggaacatattgatagatatcatataaacgaatatataaaaaacaagttgccaaatgctaaagttttttctgtacttaataccactcgtggtgcagttgaaacttgtttgatggctgagtctgcaatagaccctaatgattctgttatagttatggactgtgatttggaattctctagtaaggcttttcttgaaaatattcgtcaaatattagcaaaacctgtagatgaggtcaatggcggcttgttggtatcatttgaatcagaccttccaaagtatagttatgctgagattgatgctaataatatagtaaggcgtacagcagagaaagaggtaatatctaatcatgctctttgtggagcgtatttcttttcttcaggaaaaggttttttaaaagttgcgcatcaattattagataattcaatacctaataaatcggaattttatgtgtcattactttataattatttgttgaagaatggagaaactgtcaaactttgcttaatggaaaattattattcttatgggacacctgaagaacttaaacgatatatgtaatgctcggaagtgaaataaaactgttaattgtagattttgacggtacattagttgatacttttcgagctaattttatggcttatcaagaggcttttaatcaggtgggattagctcttaaagaggtagactatcgtcattgttttggttttaggtttgaaaagtttatggcaactgttggcataacagatccggttgtaactcaaaaaataagtgagtttaaaggtaattgttaccccgatttttttagatattttaaagtgaataattctttattagctatactgaaaacttttcacaatgctggaggtaaaacagcgatagcttctactgcatgtcgtaaaaatttagaaaaagcattgcaatacattgaggtaactgatatatttgatcttattttggcgggtgaggaggtgagacaaggaaaaccctcccctgagatatataggacagtattaaggcatttttctatgcaacctaatgaggcacttgtttttgaagattcggaagtgggtgtacaggcagcccagtcagcaggtataaactatatagttgttaattcaaactattatggagattgaaataagagggcattctggttgtcagatagacattgttaatggcggggatagcttgtttattaacaagagtactcgtgataagaattatattccacgattgtataagcaagctttgaaacagtgtaatgcttcaaagatagcttatcagcatattcgtgtaccgaaaatatatggtattgaacgtatggatgaatatctaaatattaagatggagtatatatatagtaagaattatgtagattattttgaagatgcaggatttgaccagattagttattttatcaaggcattgaaaatttttattgattctgaaattgaaaattcaaaaatgactccgattaataaaaatgttgtaataaataaatataatgatgtttgtgataaagttgctaaaaatgattttattagtaaggatacagatattaagataattctagagaagtcttcaattgtattcaatgaactagatgaagagataaacataccagttggacagtgtcatggagacttgactttttcaaatatactatttaatggaaataattactatttgatagactttctggactcatttttggaatctccattacttgatttagtaaagattaggcaagattcaaattatggttggtcgcagcttatgtatgggcatgattttgattctgtgcggatgagaataatttcagacaagatagataaagagatagatatatattatagtaattatgattggtataataagtattatagtacttttcagttgatgaatttcctacgtgttatacaatatgctaaggaggagagaactgtagcattcttaaaaaatgtcctcaattcaattttatgagtattagtttgattattcctataggagctgacaatattgagtatgagaactatatgccttatatatttaactttgctcctgatggaatctcgctttgcataaaatctattcaagggttagatttaaatcgttttgataatatctattttacaattcttgaaaaatatgataaaaaatactatttgtcattattgctgaaattgcaatttaaaaagttgggactgagtaatgctaaggtcgtagttcttgatgagccaaccactagccaggctgagactgtctatcggactgtgaattgcgagaacatagaaggagcaatttttgtgaaagatcctgatggctatttttgtggagattttaccattgcaaatagtatagctatttatccacttgataagttggaaatggtgaatccaagaaataagagttatgtggaacttgatgatcagttctatataacaaatataatagaaaaaaaaatcatcagccgtttctttaatgcaggaggttatatttttgatgatgctgctgtgttctgcaaatattatgagagattatatttgtatgaacaactttttatgtcgcatatagtctatgctatgctattggataatattccttttaggccttttgaggtgaaagacttccaagattggggaagtgaaagagattataattattatttactggatagattatggaagtattaaatggttttatagctggtcgatgtatcgtttataaaatatacaatcaatttgtattgataatttcttttattgatataataatagaaaatgatttcaagatcgaatatatgaatacaatccgtttttagtattctattgtgaagtatatttgataaaagtgatttttaacacacaaagccaataaatgttttttgggcgataacttatatgataaagaaggttagtatggctttctatgattaatgtataagaagggttaaggaaatagtggtctatgtaacttgtttataaagcaaatattttaatatttatgtcaagatcaataacagctaattatattttcaatctattgaatactatttctggaattctatttcctttaataacgtttccatattcatctaggattttgttagcagaaggaataggagaagtgaacttttatcaatcaataatatcatatatcagtttagttgtaggattaggtataccattatatgcagtaagagaaattgctagagtgagaaacgatagaaagcaacttaatgttaccacgattgagatattatctctacatggaattactaccttgattggttatttggtcgttgctattttatgttttacagttcccaagatacaaacagatttacctcttttcttgttgttaagttcttctatttttcttactaccattggatgtgaatggttttataaaggcattgaagattttaaatatattacggttcgtggtttgattgtccgtatgattgggattatattattgtttactttagtaaagacaaaaaatgatattctatggtatggtattacaattactcttacatcggtaggaaatagtgtattcaattttattagattacgtaaatatttgtgtatatgtaatattgatcgacgtagtattaatccttacaagcatttaaagtctgtaggtataacatttttattagttttattatctactatatatcttactcttaatccagtaattttaggatttatgactgatgatgtatatgttggttattattatggtggtataaaattgttttcactagtgtttggaatagtagattcgttaactgcaattttgctacctcggttttcgaatttgatggctgaaggaagagatgaagaatttgctacaatctctcaaaaagtatattcgtttactgttggagtttctttaccaatatctgttggactgttctttgttagtcaatatgctatacctattttgggtggtaatagttttataccatctataggtgtttctcagattttatctgttttgctggttttagtgggactttcaaatgtatttgggatgcagactctttatcctaaagggaaagtgtatattatggtgaaagtaactttaatggcatgtattacagacctcttagtgtgttttttgactattcctacattcaagcattatggtgctgctatggggtatttagctgcagaactagttgcaactacagggttgtacatcatgggaagaaagtatatttctattaggttattcgataaatcaataatacattatttattcgctgttattttaatggggggaggcttgtttgtgcttcagtcattaaattggaataatttattgatgtgcattataatgatgtgcgtaggagcttttatatatgtactttcacttttattgctaaaggattcgctgatattagaaggccttgcgattgttcaaaataaatgtttaaagaaataaaaatgcagttgattaagagtatattgcgaaagtttttttcatgtactatttcattgatgattcgtttatgtagaaatgaaaaggttatgctagatattttttctcgtagttttgaaaaatattcagataactatttttgttataaacttcgccccaaaaaagcagattattttattcctagtaatataaagactacaactacttctggtgaatttgctattgttcttcaagggttgatagagatgcgtgatgaatttacttttgagactattaaattatatagaagattgtttccgggagcaattatcatagttagtacttgggattatacagacccatctatagtacggactttggaattattagggtgcgaagttgttttgaataaagatatacctgtgtgtggcttggggaatgtaaactatcaaatttgcacaagcttggctggattgaaaagagctaaagaattgggagcagagtttgcattaaagaatagatcagatttacgtgtctatcgtgaatttgcttttgaatatcttaagagccttgttgaattaaatacgatttcttctagtaatgtttatggattgaaaggacgtataataacacaagctggtaattgggggcaaatgtttaatcctatgtggctgcaagattttctctattttggatatactgatgatcttataaacttatttgatattccatatgatgataggaatattcattgttatagaaaagataatttcgatacaaagcgagtactgacgggtgaaactcttgctaagtggccagcgtctgaaataaatataaccaaacgctttattcagaaatatcataattctgatttaagtctcaaagattggtggaattttctaggtgagtattgctatattgtagattcggaggacttattgacattgtggaataagtatggactcaatgacctgggacagttttactgtgaatacgatggtaagcacaattatagagatccatttcggcatataagttcatctgattttattaatatcatgaaccataagtatatatatgaagagtggatggaaaacgagaaggctaattacactatagaataatgaaaaatttaatagtttctgtagttcgtgttctagccattatacgacgatggacctttcactttacttagtaataagtgaccgatttatagtgttaagttttttatgctgtgaagaccaatcgctacagattcttattgggtatatgttggcctttaatttagttgctttgctgtatgtaattgggttataatatattagcaaaatatccttcagtaaaaggtcatttatggcatttaggatgtagtgaattcacaggatggtggtgtccgttatatgtagctgtagggactgtaattcctttaatttttgtgtacaagaagagttttgaaattaataataaataatatgaatatgaaatatattattgtcggagctggtatatcaggtttgagtattgggcaggttcttaaggagtatggacatgatgtgcaactatttgaggcagattcgcgtccaggagggatggtaaaatgtgatagagtgcatggacatttgtttcatcgcactggaggacatgtctttaacacaaaacgtcaggatgtattggattggttttggagtcattttgacaaaaaagacgagtttactatggcagatcgaaattcagttgtttcaatggctgataataccataattgcttatccaatagagaatcatgcttatcaactttcagatgagatgatgaaaaattttattaatgatattgtgttaatggctactaataagcctgtagaacctactaattttgaagaatttttgcgagctcgttttggtgagacactttatcgtgaatattttcgaccatacaatgaaaagatctggcgtcgtccactgacaaacgttccactgtcgtggttggttggtaaattaccaatgcctacacttgaagatattatttataataattttaagcatattgaggaaaggtcttttgtacatagttcgtttttttatccgaaaaaagagggttcgcagtttgtcgctaaccgcctttcagaaggacttgaaatacattataatgtagatgtaaaatctattgaaaaaatagaaaaaggatggtctgtgaacggagagatttgtgatagagttatttttactggcaatatgaagtcaatacctttaatagttaaaggagttgacttatcggcttatattgaaggtattgaagctcttgaagcccatggtaccacaactgtactttgtgagattgaagataatccatatagctggatttatatgccaagtcatattcatgaggcacaccgtatcatttgtacaggtaattttgcagagtcaaatcgtgcgaatggagtaatgtcggctaccattgagtttacagatgagattagtaagaatgatattattgataatctctctcgtataccatatcatcccaaatatatagcacataactatgctccttatacatatccaatccaagcaaaagatacacgtgaatttgtcaatagtgtgaaatgtgttactgagccagaaggtctatttcttcttggacgttttgctgaatgggagtattataatatggatgtagcaatgggggcagctctagatttgtgtaataataaattgaagtagtatgatagccgtaaatgtaaatgctggattggcaaatcaaatgtttcattatgcttttggtcgggggctgatggctaaggggttagatgtctgttttgatcaaagtaactttaaaccacgttctcaatgggcatttgaattggttagacttcaagatgcttttccctcaatagatataaaagtaatgccggaggggcattttaagtgggtatttccttctttaccgcgaaatggcttggagcgaagatttcaagagtttatgaagaaatggcataattttatcggtgatgaagtatacattgacgaacctatgtatggatatgtacctgacatggagaaatgtgctactagaaattgtatttataagggtttttggcaaagcgaaaagtattttagacattgtgaggatgatatacgtaaacagtttacttttttgccttttgatgaattaaaaaatattgaggttgcagcaaaaatgtcgcaggaaaattctgtagctattcacttacgtaaaggtgatgattatatgcaatcagaattgatgggaaaaggattatgtacagtcgattattatatgaaagcaattgattatatgagaaagcatataaataaccctcatttttatgtattcacggataatccttgctgggtaaaagataatcttcctgaatttgaatacatgttagtagattggaatgaggtatcagggaaacgtaattttcgagatatgcagttgatgtcatgtgctaagcataatattataggaaatagtacttatagttggtgggcagcatggcttaatgcaaatcaggataagattgttgttgggcccaaaagatttttcaatccaatcaattcgtttttttcaacttgtgatataatgtgtgaagattggatttcattgtaaataagtgctagaatgtattaaataaatttgatgccatggtttgaactttctgttattttatcgttttttatgtaaaaatattttaagtgaaaactgttaaggaaatcattggaaaaataagaaatatgagtatgttgtcgaagatcgtattttcattatgtaatatttttcaatatttttttttattgccaggcaaagtatgtggtagattatttaattatgctatccattggcatttcaaggacattaaaggtcgtatatatcacgcgcgacagcttaaagggctacaatatgttaaaatagattatggtacaattctttctcgtggaatagtgcttacggcatgggataaatatgctggatacgattacactccttctattcagattggcagtcattgtagaattggggagtattgtcatattactgcttgtcatagtattacaataggtaataatgtgttaacaggtagatatgtctatatttctgataattctcatggtaaaaatatagagtcagaattaaatactcctccatcgttgcgaccactttatgtaaaaggtcctgttgtgatcggtaataatgtttggattggtgagagtgcacgtatactttcaggggtgactattggagatggggcaataatcggagctaatgctgtggtaactcatgatgttccaagtggagcagtagtagggggagtaccagctaaagtcattaaaatgatgacattgctagattgaaaagaatttgcaatataggtaaaaatattgctaactgtcaacagcgaagttgaaaaaatgatgataaaattaatatatgaatagaaaagcgcaagttattgcattttatttacctcaatttcatccattttcagaaaatgacgaatggtggggaaatggttttacagaatggacaaatgttggtaaagctaagcctttatttaaaggacatcggcaaccgcgagttcctgctgatttgggctattatgatttgagattatcagttgtacgagaacagcaggtaaaacttgcaaaagaagctggaatatttgggttttgttattggcattattggtttggaaatggaaagagacttatgcaagatgtatttgatgaagttcttgaatctggtaaacctgattttcctttttgtttagcatgggctaatcattcttggtattctaaaacatttgataaagattccacaggagataaattattaatggaacaaacatatccgggagaggaggatattgaaatgcatttttcttatttaaatcgtgcttttagggataaaagatatataaagatagatggaatgcctcttttagttgtttatgatccagtgtctttaccactgaagtatattgatatgtttcaacaattggctcgtgaggctgggtggttggatggcatttatatagtagctaatatagtaggtggcattaataaaaaagagatgtttattgaaaaaggatataatgctgtgacttttcagcgtttagctagtgtcatatttgatgctcaaaataaaagaggaaaaatattatattatatacgtcagaaaataagatctttgttttatcattatcctcaatttgctgttgattataaaaagtgcattccgtatttgataaataaaaatatagatgggagtgaagatgtgattccatgcattgtacctaattgggatcatactccacgaagtggaatgaaaggcagtatgtttttaaatgaatcccctgaattttttagattgcatgttgaagatgcccttaagacagttcaatataaaagaaataaattaatctttttgaaatcctggaatgaatggggagaaggtaattatatggaacctgatcttacatttgggaagggatatattaacgccttacatgaggcattgaatagtacattagggaaatgaaaaaagtggcttttgtttctgaaatggcattattggaaccaaatctaagtattgtgaagcgtttaaatacaacttatgatttgtattatgtcactgattgtcgacaggatattcctaataaatttggtataaagaatattagacgaggaatcaatagggctatagattatgaagaaatgacaaagttctcttcattttttaatcttcaaaaaacctacttgatttattctttgactaataaaaatttttttaacgcaataaagaaagcttatgatgtggtaagagttgtgagaaaaatatcacctagtgttatattaactgatacaacggctccctatactgtattgttgtttttgttttactatcataaaatagtattattagttcatgatccttttcctcattctggatataaaaaaaagtggcttatattgtttcgttatcttgcttttaaactgattcgtaataaagttatttttaatacgaagcaatatgaagcttttattagaaattataaactatctcctcaagatgtattttgttccaatttgagtacatttgaatttatgaaagtttatagaccgtgtaataagaaaaaagatggaaagttcaagattttattttgggggataatttctcaatataaaggtatagaatatctttgttccgcatttgaagaaatagtaaaacaaggctatcaagatatagagttaacgatagctggatcaggcgagttatatttcgatatagatccttatcttaagtatagcaattttaagtttatacacaaatttcttactaatgaggaaattgctgattatgtatttaatacagatatagtcgtttgtccgtatgtcgatgctacacaaagtggagtgattatgactgcttttgcatattgcaaacctgtaattgcgactaatgtaggaggactttctgaagttgttgatgagtattctggaattctaatagagccgcgaagcgtaaaacagcttgttgattcaattttgcttctgtataaaaaaccgtatataataaaacaaatggagagatatttgcgggaagattatgcggaaacggaaaaaggttgggaacatggaagtgcaattattgcttctgcaatagaaaagcagtatgaagaacaactttaatttggacataggcaaattaattctttatttggccatatttactcctttcatgcctaagttaaaactgggggaaattaatttatatttagttgaaatatttttattggtattttttcctttattgtttccttttattagacttaaatttcagagaatagttttggctatgtggggaatagtgttagtctcaactatttattcttttatttatgttattgaaatatcgtcattactgaaagttattaaaggaataatttatattcctcttggatatttggcttatgttgaatataaatgtaaccctagaattttgtgtaagattctttactcatattttttatgctcttttttaagtctatgtttatttttgtttcagctgtcagaatcggtttctatttggagtggcaatggtttcaattcaggtttgagtaataaatgttttgatttgaaatcaatgtctcttgtttcgtcaggtttatcagcccacggtgtctttggagattattcatgtcttatatttacatttgctttagtattgttcttctccaaaaaaattaaattatcaatgcttcttactacactgatgtttactgttataaatttgatgtcttctgttagtagagaagctttagtttgtttcatgtgtgtaatatgtggtctagtaattaagacaataagaaaaaagaaatattttgtagggtatattgtaattctaattattttaattagtgtggtgagtatttatggtgaatatattcctttagtaaataaaatattatatactcaagaggctataagtacaacaggaaatgaaggaaatattgaacttagaattggcgcttggaaattatttttttcttctttgatagataatcctttctttattttgactggatatggatacaattattctttttatgaagatattgtacggtcgatagcattaaaagtaaaatatccttttatattattgccagagaattattttgtacaatttttatggtatggaggagtgtttgctagcatttattcaattcttttttggaaagagatatttaaactttgtacaaatgtttttagaccatggagtttaatttctacaacttactttttaggacttttgataggtagtttaatttctgggtctgcaataacttcggatttattgtattgtcaagtattaattgttttgggaattatggctagtgaaaaacagaataataaaaacaatcaaatgaatttagagtaatgaatatattattgataacagttagagcagattttggaggaggtccgcgtcatgttcatcaattgattgaagagttaccttctgatttcaatatttatgtagctttccctcagggtaagccatatggcaatttgtggcaggagcatcctaaaataaagaaatgtataaatattccatataggaagttcagtattaaatacttattcttattaagacgctttattattgaaaacaatattagtatacttcattctcatggaaatggtgcaggtttatattcccgaattttgaaaataattgtgccgcagattaaagttgttcatacttttcatgggattacgaataattattcttcatattttatatcctgtatacataaaataataggacgtagtttaagatatcttacaaataaatttattttagtgtcaaatggcgagtttaaacttgggaaatcgatgcgttttttgtttacagataaatcagttataatatataatgctattgctgatgagggacttaaatttaatagatatgataataaacttgtaataatttcattatctcgctttgattttgcaaaaaatatggatatggcatatagaatagcaaaagcattaagaaataatcatgaaatagaatttgtgtgggtgggagatggagaagactttgtgcgattaaaacaaaaaagtgtagaagagcatgttaatataaattttattggattcacagaataccccatgtcttatcttaagaacgctgatttgtatctatccacttctcgttttgaaggtttaccatatgccctaattgaagctgcatcagtagggcttccaatagtcgctacagatgtggttggtaataatgaagttgtacttcacgattataatgggcttgtgtttaaaacagaacaagaagctgtagatgcaataaaaaaattatcgataaatgctgatttgttgaatcgatattcgataaattctcgtgaactttatcttaaaacttttacgatggaaaagatgatatcttctattgtagatacgtatgtacaggttttaaatcagtaagttattgtttaaaattgaaataagatgaagattgccatcattcaagaatggttagtaaccgttggcggttcagataaagtagtcaaagctattgcggatgtatttccagacgcagatatttacaccttagttgctaaaaaacaagtttgtgacgaattagggattgactggaataaagtccatacatcattcattcagaagttacctttaggggtaaagaagcataggatgtatttgcctatatttccgtttgcaatagaacagtttgatttacggggatatgatgtgattatatcatcttctcatgctgtagccaaaggagttctaaccaaagcggatcaattgcatatttgttattgtcattctcctattcgctatgtatgggatatgtatcatgaatacttggaagaatcagggttgacaaaaggcttgaaaggatatctggctaaatatatgcttcaccgtattcgtaaatgggatttgatatccagcttccgggttgactattttataagtaattcagattatgtgggacgtcgaattcaggagacatataggcgggatgctgtaacaattcaccctaatattgatatttctaactttgatttgtgcgtagagaaagaagatttctatttaactagtagtcgtttggtgggatataagaaaatagatcttattgtcgaagctttcagtcgtatgcctaataaaaagctggttgtgattggtggaggtcctaatttggaaaagatacgtaagattgccgggcataatgtaactgttatgggatatcagtcatttgccgtactaaaagaaaagatgcagaaagctaaagcctttgtttttgcagcagatgaggattttggtatgattccgattgaagcgcaatcatgtgggactcctgttattgcttatggcaggggaggttctttggaaacagtaaaagaaggagtaacaggtcttttcttttatgaacaaactgtagaatcgattattggtgcagtagaaagatttgaaaaactagaaagatcgtttgatcctaaaataatacgtgaccatgcggagactttttcggaagaacgttttaagaaggaaataaaggagtttgtagagttaaaatataatgaatttaatcatctagtgaaatgagttattttatatttggcggttccggttttatcggtacgcaccttattgctctaattgataatttatatccgggtacaaaaatatacaatctggatattgtggagaataaccatgaaggtaaatctacatatatcaattgtgatgttcgttctgaaataaatattgatattcccgttacttccgaagacgtcatctttaactttgcagccgttcatcgtaccccgggacatccggaccaggcttattttgagacgaatattcgtggtgcggagaatgtatgtgcttttgccgagaagttcgggataaagaaaattgtttttactagttccatagccccttatggcgcagctgaagatttgaaaacagaagagacgcttcccacaccgaacacaccttatggaatttctaagttagtggctgaaaaaatacatacgatttggcaggcaaaaaagctgaacgaacgacaacttactattgttcgtccgggtgtggtattcggtaaaggagaaaatggaaactttacccgtttgtattgggggatccgtggtggtaagttcttctatccgggccgtaaagatacgattaaagcttgcatttatgtgaaagaattggttcgctttatgctttaccggttggagaatcatagtgaaggagtagagttatataactgtacatttgaatcggcttttactatcgagcaaatagtagaaacgatgaaaaaggctacgggactacaacgtaccattgtcaaggtgccgggaagtcttctaatgacagttgcaagtattgtcggtccgttagggggaaaagctttaggtatttgtcctgctcgtgtgaagaagttaatgatctctactaatatatgcggaaagaaactggctgattcggggtataagtttcattatacatttgaagaagctattaaggattggtatagagataatgatggtcagtgtttgagatgatttttcttaaacaatttgggtatatataataaatgttgaaaatgttgagatgtaataaacacgtgagtgtttcgtatgtgagatgaagaaaaatgtaggtccctagcttcatgctgtttacagcatgattctcctacattgtggattagaaatagcgcgacggcgcatttctaatctacgccctgacatcggaggttaaagccgatgtgaatttcccactatatcaactgtctgtgaagatcgttgatatttcctaattttacgtatagtgatgtatttagacacacaaatataaagaaaaaacattgggagatttgtatcgaaatatcccaatgtttgatttcaatcattgagatgtttttttcaaatcttccgatgtttttccgactctccaaaaggacaaaaggacaaaaaggacatatatgactgtttttattcatcttagtataagaatcatgaggtatattgctgatctttattatgttaaatgattttgtagacgtgttaccttacgaatgttgaaatcgtgttttgcgccaacctgaatcgttttgtctgtcatgaaatgcttggtcaactcttgaacgaaattacgtatattgtcaggattatttagtgaaaggaccgtgcttggaaagaagagcgatatcttgttcgcgtttgctttcgccttcaataatacaatcattcgacaataaggtaagattattgtacgaatttcggggaaataaaggagctcctttctggaattcctttcccaactaataggcttcgtcgttggcattggaatttttatagtaccataggggatttttgtccttatgtccttttgtccttttgaaaggagggcacgttggtgggggaaagaagaggtgtgtgagatttataacttgcttgtatccagtagataaactctcgtttcttttttagggacgaaaatttgtgtgctcgaaaaaatgcaggaagctcacgtaatatgcttttttgcgaatagtgttagtgacagttgattttagcagtggatcgctaattgtttccctatgtggacaatatttgataaagtaataaaaactgaaatattataaattattaatcatagaatgacatggcaaaagaaaaacagaaaccatacgagtttttaagcaatttggtattggctttaatgggaacggatcgtattttcagtaacagtttcttttccagcgaatttgctatttctcccaatacactgagtgagataagacggggagaggatatgtgcatttatcagtatgtacgggtgatacggtgtatgatgaagtatcttcatttaattgttcgaatggatatgttgctaaaggaattaagaaccgtattagcttccaattgtgatttggtggttgctacgattccgcaccgttttcacggaacttaccaaccgaaagagtgggtggtagtaatgcattgggatggtataagataaatgttgaaatgaagaaatatgtaggtccctagattcatgataaactcatgaaatccctacattttacaggttagaaatcgtacagcggtatatttttaacttgaccctcgtatcggtgtaaaaactgatatgtatctatatgtgaaatataccaactgtctgtgaggatcgttggtatattgcgttttaagggaacgttgtaccataggggagtggaaaatagaatagatggttaaagaatacaaaaaaagagcaaactcataatattcctaaatctttccggaatctgtatcgttatttgtagcatagaataaagtatagtattaacgctaaaagaataacgattatgaagaaatttctatctctacttgtactggctctggtagccgtgcagttttcattcgcaaaagatgtgataactaaagacatgaatcagttgccgcttccggcacgtaattttatcaatagtaattttacaaaaccacaggttgcccatatcaaaattgataaggatatgatggaatctaccaagtatgaagtgttattgatggatggtacggaaattgattttgacagtaagggaaactgggaagaggtaagtgctaagaaagggcagactgttcctgttagtattgttccgggattcgctgtcaactacctgaaagcacataattttgtgaatgaaggagtgacgaaagtggaacgtgaccgcaaagggtatgagattgaattgtctaccgggctttctttcaaatttgataagaaaggaaaatttatcaaggctgatgattaacaagttgcagtaaatagacctaaacaagaagataactatgtggagatttaagtttagcgcatgggcagtagtgttgcttatgactgccctttctttcggcgcatgtgataatgacgatgatgatacttttgttccgcccagtaatattacggaggccttgaaacaggtatatccggctgcccagaatatagaatgggagatgaaaggtgcttattatgtagctgactgttgggtgagcaatgatgaattggaagtctggtttgatgctaatgccaactgggtgatgacagaaaatgaactgaacagtattgatcagttggtgccggctgtttatacggcttttatagattctaaatataacgcgtgggtagtgacagatgtatatgtgttgacatttccacagaatccgatggaatctgtgattcaggtgaaacaaggtagccagcgctactcgctttatttcacgcaggatggtggattgatacatgaaaaagatatcagtaacggagacgatacgaattggccgccaactgaataacttttaatcataaaaatgacaacggaccatttctataaaaggaatggtccgttgctttttataattacatttgtttgtaatccttggccaatcctccttcacttgtttctttatagagtgacggtaggtcatgtccggtctgtttcatcacttgcactactttgtcgaaagagacacggtgcatgccatcggtgaaagctgaataaagattagcatccagcgcacgtgcggcggcgtatgcatttcgttcgatgcagggaatttgtaccaatccgcataccgggtcgcaagtcattcccaaatggtgttccaagcccatttctgctgcatactcaatttgtgcagggctgcccccgaacaattgattggcggcagccgaagccattgcgcaggcaacaccgacttctccctgacaacctacttctgctccggaaatggatgcgttgaatttgacgatgttgccaaacaaaccggcagtggctaacgcacgtaaaatgcgcatatcgctaaagtcacggcttttttgaagatgataaagtacggcaggcataactccacaagaaccacaagtcggagcggttactattttaccgccggaagcattttcttcacttactgccaaagcataagagaagacgagccctctggattgcagggattgtttgtatccggtagcacgtatgtaataagtggaggctttccgccggagatttagtggtccgggtagtacgccctctgcttcgagtccacggtgaatggcatctttcatggtagcccatacttcagccaggtagtcccatatatcttcttcctcacattcctttacgtattcccaataactttttccggtatcttcacaccattggagtatttcagtcatgttttccataccatatacatcggggctttcgatggttggattgtcattgttttctgccagtgcaccaccaccgatgctataaacagtccaattctcctgcactttatcgttgctatccagagctgcaaatgtcattccgttcggatggaacggtagaaagactttgggctgccacacaatttctaccggggcagtgggttgcaaagtgtctataatggctacatccgtcatgtgtcctttgcctgtagcagctaaactgccgtaaagggttactttaaaagatgcagcatccggatgacgttccagaaacatttcggcagctttacgcggtcccatagtgtggctactggaaggtcctgtgcctattctatatagctcttttatcgatttcatgactgatgatgtgtttttgttaataccatttcttttttctgaagtacaaatatacaataataccgataattgccattacaatccaggcaaataaatacccgtattgccattcgagctcgggcatccatttgtaattcattccccatactccgaccagaaatgtcaaagggataaagatggtggatacgatggttaacctcttcatgatgtcgttcatacgtaaatcattgttggagatgtacagatcgactaatgaggaaagagtttcccggcagatctcaatggtttgtaatacaaattgcaagtggtcgtttacatcattgaaaaaggcacggttcactttgtgaatgagcaggttttctgcccgtagtaacttgatatattgttcttttagtggaaggatggattttttcatcagcatatattggcgtcgtaatgcctgaatctgaataccgatgtcatcaccgctggtgatggtgagcagttcttcttccaaatcttcgagtgcgtcatcaatggaagagattgttgaaatatagtttcccatgatgctgttgagcagcacgctaagtagataatcagtctggcggctgcgtatcttcaggacatcattacgcagggcggagctgacatcatcgaagaagtcggtttctttttcgaggaaagtaagtacgtagttattacctagaataagacaaacttgctgttggagcaactcgtccagttcgtcttcttctttatgttcgttggggtagaatatttttaagatcaggacgatgtatttgtcatgctcttctatcttggtaggatgatccgcattcagtatatcttgcaggactaggaagtctatttcaaaatgactgcaaatttcacggatagtctccgtatctttcattccgtgtatttgtagccaattgatccgatcgctgttcagtgttcccttgatggcttgaaaggtgtcgttggcgctttcctgcatctcggtagcattgtaagtacaaagatgtaagtgggtaggagtaagactgtctcctgtgtaaataagcttttcgcttaacagattattcttcatgctttattctcgttttagaaaaccactgtaacaaaggtagtggttttctaaatgagaacaagttctttggatgttttgtttacaggttagtcaaaatcgactactgtgattccggcaccgccaaactgcacatgttcgtcggcatagtggctcactcccggtacggtggccagatactggcggattaatgtacgaagtattcccgttcctgtgccgtgaaggatgcgtacacggtccatgccgactaatatggcgtcatcgataaaataggtgactgcttgcagagcttcgtctccacgcattccacgtacgtcaatgtcttgtttgaagctaagcttcttttcgtacatttggtcatgcgtctggctactgacaaaggtgcttttggcgattccttccatcttgggtgcattattactacgttccagacggtctatttttacggtcgtttttatgcttccaaaagcaacggtcgcatttttaccattgatttccatcacttggccgacacttgtctgtcctttgatttttacattttcacctactgcaatcggcactactttaggagcacttgacggggaagagactgcggctttcggttcgtttttcttatttttcttccgttcttgtttctcctttaatttcttcattttctgtgcaatcttctcttcatgctctttagaagccagcgcatctaaagaagtacggaagtctgtcagttcctgacgtgcctggcgtgtcttttccttttcagcttgtgcttccttgattgtgcgtattgtgttttcaatgcgtgcattggattcctgaagcatccgttccgcttcttcttttgcttgccggatgatctctttccgtgatttctgcaactcttccatttccgtttggtagcgggcaatggtttcttccatgtgtttttcccgttgacggatagtttgacgttttccttcccagtaacgcttgtcgcgcacgatgtcctgaaggtatttgtcggcattgatatattcacttcctacgatttccgaagcatctgcaatgacatcttccggcaatccgatttttcgtgcgatttctacggcaaacgaacttccgggatttccgatttgtagctggaaaagtgcttgcatgagatggcggtcgtaaagcatggctccgttcactactccttcatgatcttcggcaaaatgtttcagattctggtagtgggtggtgatgactccgaatgttcctttctggttgaaacgtttcagaacggcttcggcaatagcacctccaatttgcggttccgtacctccaccgaattcgtcaatcaggatgaggctccgctcgttgcaactcttcatcatgattttcatattggtcaggtgagaagagtaggtactcaaatcgtcttcaatagattgttcatcaccaatatcgataaagatgctgctgaatataccggcgtgactgcgttcgtgcaagggaatgagcataccgcattgcaacatatattgcagtaaaccgactgttttgaggcagacggacttacctccggcattcggaccggatataataagaatgcgttgtttttgattcagttctatatccagtggtacgactttttttccgtgtttggcaagtgaaagttgtaataaaggatgcacagccattgtccagtccagtagttgctcattctctacggcgggtttcagactattggtctgtatggcgaaatagcttttcgcacggataaaatctatttctgccagaaattcgtatgattgaagaatttccgggatggacggacggagaatgtttgaaaactcggtaaggatgcgaataatttcgcgtcgttcgtcgccttcgagttcgcgaatacggttgttggcttctacgacttccgccggttctataaacactgtttttccgctggcggattcatcgtgtacaatacctttgatttttcgcttgagtccgggtgcgacggggatcaccaaacgtccgtcacgcatggtgggagctacgtctttatctacgtatccttcggattgtgcgctgcgcaggatgctgtttaacgagcgggaaatatttcccatcgtactggcaagctcgcgacgtatacgggctaattcggtggaagcattatccttgatttttccatatttgttaaggataccgtctatttttcctatcagttgagggaaaactgctatatctcctgccagtcgtttcaggctggggtagggggtatcgttctcttcttcatcttcattccgatggagaaagcgtacaatgtcgcggatagtttctaacgaacggcgcaggtcgaatagttcttgttcgtccagatacattccttctatccgcacccgctttagcgaagggcggacatcaaagaaaaattgatcgggaaatccgtcctcttcctggatgatgcggataaactctgttacctggtttaatttctcctcaacttcttcatgttgctccgaaaaggtcatatctgtgactctttcttcgcctaaagtgctaagacacttatcttttagtaactgtctgatctggtcgaatcctatcttttgctcaaaattttgagggtatatcatatctttgttcttactaatggactgcaaaaatacgattaattcgcgaaaaaattatcagaatgtttgcagatttaaaaatgattcgtacctttgcaccgctttcaacggaaagcacttctgataaggaagttttggagaggtggcagagtggtcgattgcggcggtcttgaaaaccgttgtactgcgaggtacccggggttcgaatccctgtctctccgcttttaagcattgaatatcaatgcgttatagaataagcatcctaattaaggtatcagaaaatgaccttatgggatgcttttttattttatgatatttttgggtgatttgattccaatttagtgtattaacagggaaaatttgcagacaggaaaattctctgtatctttgccggcatggcacaaaaaggtgagttacatataagaaataagcacaatggtcaatacgattttccgttgttgatagaaaaatatcctccacttaagagattcgtatcacttaatcctctgggtgtacaaactataaacttttttaatccgcaagcagtaaaagctttaaataaagcattattaatcagttattatggcattcggtactgggatataccgaaacaatacttgtgtccacccattcctggaagagcggattatattcattatattgccgatcttattcagccggatagggtagcgaacgatttgcagacagaggaggaagatgcgaacgaacagaaaacgaaatgcagatgtctggatgttggggtaggtgcaaattgtatttatccgattatagggcacacagaatatggatggacatttgtgggcagtgatattgatccggtctcgattgagaatgcacgaaagatagtgacttgcaacccggtattggcacataagattgacttgcgactacagaaagacagtcagaaaatttttgatggaattatcatgcctggcgagtattttgatgttacgatatgtaaccctccgtttcatagctcgaaggaagaagcggaagacggaaccttgcgcaaattgagtagcctgaaagggacgaaggtgaaaaaagtacaattaaattttggcgggagtgcgaatgaactttggtgtgagggtggagaaatccgttttatactgaatatgatctccgagagtcagaaatatcagaagaactgtggatggtttaccagcttggtttcaaaagaaaagaatcttgaaaagctatgtgctaaattgaagtctgtgaatgcatcggagtataagattatcagaatgcagcagggaactaaaagcagcagaatattagcttggcgattttctaataactcataataatgagtgcttattgatctgttatttttaaacctattaaataaaatattatggaaacaaattacatcactttgacgaaggagaatattgcggacgaacatatatgctgtgccttttcggataagaaatgcaaagatagttatgagttaaaaaaagcatggctgaaaaaagagtttgataatggttatgttttcagacgtattgacgaacgggcgaaagtgttcatcgaatatggtcctgctgaaaaggcgtgggttcctgtcagtgctcctaattatctgatgataaattgtttctgggtgtcgggtaaatataaaggatgcgggcatggtaaggctttgctgcagtctgctattgatgatgcgaaattgcagggaaaagatggtttagttaccgtagtgggcacttctaaatttcattttatgagtgatacaaaatggctgctgcgacaaggtttccaaactatagaaaaacttccttacggattcagtttgttggctttgaaaataaatccggctgctcccgatccttcattcaacgacagtgtcttgacaggtgagtgtcctgaccgggatggaatagtagtgtattatactcatcgttgtccgtttactgaattccatgttcgcggttctttggtcaatgcagccaagagtaaggatctcccattaaaaataatagaattagaaaccatggaacaggcacaaaatgcgcctactccagccactatctttactcttttttataatggtaagtttgttacgaccgatttgagcgtgtgtattgaagcccggttgggaaaggctttaggcttgtgattctgtgagatgaagatttatcagaaactaggattgggataagaagatagctaatgtttcttattttaattttgcaaaattaagatgtaccttgcactttttatggaaaatacatatctttggatgttgaatgattaaaatacggtaagaacttatgcgtttttttgtatgtattttggtgcttttatttgtacataatcaattttcgagggctgataaaactttaacagatgattctctgtatacggagaaatatatcagggatatttatattcccgaacctaggcgtgctctgcaattactggacgaagcggagaacaggaaaacgattcctttgcgggttgtaaatgaattgcgtagtttatcatatagtaatatgtatatgaataaattggcatttatgtatgcaaggaaagcttatttgcttgattccatatatcaaaaagatccgaaacacatgctgaaaatgacagtacatttggctgagttttcggcaatgatgagtaaatataatgaaagtatgcgttatgcattagatggaatcaggcaggcgcaagaattagggaacagggaagccaaagccaggttatttttctgtatgggggagaataattggagattatcttttaaagataaagcatacgattattttaaccggactattgagcttttgcggggctcaaaggagatgcgggaaatgatgctgctctcttattactatggagcagaaatgagctttttaatgaatgattctcgaattgatgaggcattgaaagtgggttttgagcgtgaaaagcagattaaacggcttaaggaagtacctcaaatctctgaagattatgtagatggtcaatatagttatttatatgccaaattagcctacatctattgcatggagaagaaatatgagaaggcggagcaatattatcagaaatacttatcaaagaaagagtctcatactcccgacggaaaaatgtactcggttccttatttggcgctttccggacaatatgaaaaggttattgataattgcagggggttcaaggaattgatgagaacccagcaggatactttgaatgaacagtatctgactgtccttcgacaggaagtgaaggcatatttgggtatgcataaatacaaagaagctgccgagatacgtgaaacgattttaactataacagatagtatcaatacccgggatagaaacaatgctgcattggaattgaatgcaatgtacggcgcttctgaaaaagaagaatatattgccgaacaggcttttcaattaaaaataagaaatattaccctctgttttcttgcgtgtattgttgtgttgactctgtttatcgtttggcgtttgtggcatttcaatcatatagtcgagtataagaacaggatgcttgccaggcttataaacgagaaatttgctaatagaaaagatgggaaccagttatcggaagtatacgaacaactggctgttgtgtcggaggttgaaccggaacgtatttcacccgaagaactggaagaacttgctaacgatacagataaagaaagtggggaagaagaagagaataagaagatatttcaggaactgaatgatatcgttattcagaaacagttatatctttcttcagaattgtcgagagaagatctggcacaaatcgtacatctgaataacgcacgttttgcgaggatgataagagaatgtaccggaaccaattttaatggatatatcaatgaattgcgcattaattatgccattgaactgatgaaaaagcatcctaattatacgatacgtgccattgcggatgaggccggatttaatagcaccccgattttatacaatctttttaagaaaaagacgggaatgactccttacgaatttaaaaaagcacaggattcgttatagaattgagtggattctgctaaacaattttcgcattttccggtttatctatttataattaactattaatagagatgatacaggtaaggataaagcgggtttacgacgatttttcagaaacagatggctaccgggtactggtagataaattatggccacgtggaatgaagaaagaatggctgaagtacgattattgggcaaaagacatcacaccgtcttccacattgcgtagatggtttcacgaagatattcccggacactgggaagattttgtcgtacagtatcagaaagaacttgacgcttcttcctcaacggctgattttctgactcttatcaagccgcatccggtgataacattgctttacgcttccaaagaaccggtgtataatcatgcccgtatcctccgcgattatctggaaatgcgtttgaaagattgaaattaaagtaatttttatctgtttacgctttctgtcgttcactcaatttcctacctttgtaatctaaatcaaaatcgtgtaatcatgaagtataaattattggttcttgatgtagacggaacactcctcaatgatgcgaaagaaattagtaagcgtacattggctgccctgttgaaggttcagcaaatgggagtacgtattgtgctggcatccggcagacctacttatggcctgatgccgctggccaagatgcttgaacttggaaactatggaggttttatcctttcctataatggctgtcagattatcaatgcacaaaacggggaaattctgtttgaacgtcggattaatcccgaaatgttgccgtatctggaaaagaaagcccgtaaaaacggttttgccttattcacttatcatgatgatacgatcataacggattctcctgaaaatgaacatatccaaaatgaagcccggttgaataacctgcaaataatcaaagaagaagaattttctgctgccgttgattttgctccttgtaagtgtatgctggtgagcgatgacgaagaagcactggttggtctggaagatcactggaagagacgattgaacggagcgttggacgtattccgttcggaaccatattttctggaagtagttccctgcgctatcgacaaagccaactctttgggtgctttgctggaggtactggatgtgaagcgtgaggaagtgattgctgtgggcgacggtgtgtgtgacgtaacaatgattcagttggccggactgggtgtagctatgggacattcacaagactcggtcaaagcctgtgccgactatgtgactgcttcgaatgaggaagacggagtggccgttgcagtggagaaagctatcatagccgaagtgcgtgcagccgaaattccccttgaccaactgaatgcgcaggcacgccatgcattaatgggaaacttgggaattcaatatacatacgccgacgaagatcgtgtggaagcaacgatgccggtagaccatcgtacccgtcagcctttcggcattttgcatgggggagctactcttgcactggcagaaacagttgccggactcggttcgatgattctttgccagccggacgagattgtagtaggaatgcaggtcagcggaaaccatatatcttctgcacatgaaggagataccgtgcgtgcagtaggaacagttgtacataaaggacgttcctcccacgtatggaatgtagacgtgtttacttcaacaaacaaactggtgtcttccatacgggtagtcaacagtgtgatgaaaaagagatgaccgacgaagaaataagtaacttgacaactattgatgcatttattcagcggaagcagccgtttgctgtttaccgtattcccggagagaaagttccccgtctgttgacgcaggcggaaggagcggtccgtttgatatacgatttgaaagaactgaatggacagagaggatttgtaattgctccgtttcaggtgagtgagtcatgtccggttgtgttgattcaacccgatcagtgggggcagcctttaccggtggatgatgatacggaagaggaccgggagatagccttgcgcctgcaagggcaagaatcatttctgacttcttccacggaagaatatacggcatgctttcatacctttataaatgcgttacgtgacaggacttttgataaactagtgctttcccgtcatcttacagttgataaagtagctgatttctctccttcgtccatctttcgggcggcttgtaaacgttatattcattcgtatatatacttatgttatactccgcagacagggatctggctgggaagcactcccgaaatcattttatcgggtgagaaagacgaatggcatacggttgcgctggccggaacacagcctttgcaagatggcagactgccgcaagtatgggatgaaaagaaccggaaggaacaggattatgtatcttcttatatccgtcgtcagcttctttcactggatatccatgctacggaaaacgggccatatcctgcttatgccggtgctttgtcacatttaaaaaccgatttccggttcgctttgaaagataataaaggtttgggagaccttctgaaagttttgcatccgacacctgccgtatgcggcttgccgaaggaagaagcctatcagtttattttgcagaacgaaggttacgaccgccgctattactccggttttatcggatggctcgatccggaagggcgaacagacttgtatgtaaacctgcgctgtatgcatatcgaagataaacaactcactctttatgccggcggtggattattggcctcttcggaactgaatgacgaatggctggaaacggagaaaaagttgcaaaccatcaaacggctgattgcagtgcctcctttaaaatcataaactactaataattatcatcatgtatacagacaagaagaacatactccagttggttgcgttgcttgaggcgcatgggattactaaggttgtgttgtgtccgggtagtcgtaacacccccatagtgcatactttgtctaaccatccgaattttacctgctatccggtgacggatgaacggagtgccggctattttgccatcggtcttgcgttgaatggtggtaagcctgctgctgtctgctgcacttccggtactgcattattaaaccttcatccggctgtggcagaagcattttatcaaaatgttcctctggtcattatttctgcagaccgtcccgctgcctggatcggacaaatggacggacagactgtaccacaaccaggcgtatttcagacgctggtcaagaagtcggtaaaccttccggagattcatacggaagaagatgaatggtattgcaatcgtctggtgaatgaagcattgctggagacgaaccatcatggaaaaggaccggtacatatcaatatccctatttctgaaccattgttccagtttacggtcgattcgcttccagaagtgcgtgtcataacccgttatcaggggttgaacgtctacgatcgtgattataacgatttggtcgaccggatgaataaataccagaagcgtatgattatcatcggtcagatgaatcttatctatctgtttgaaaaaagatatatcaagttattatataaacattttgcctggttgacggaacatatcggcaaccagacagttcccggtattccggtaaagaacttcgatgcggcgctttatgccatgcccgaagagaaggtagatcagatggttccggagctgctgattacttatggaggacatgtcgtttccaaacgattgaagaagttgctccgtcagcatccgcctaaagaacattggcacgtatcgccggacggtgaggtggtcgatttgtatggctcattaactacggtgatcgaaatggacccgttcgagtttctggagaagatagccagtttgctggacaatcggactcctgaatatccccgtgtgtgggaaaactattgcaagatcattcctgaaccggagtttgcttattcggaaatgtctgctgtcggtacgttgttgaaagccttgccggagtcatgtgcgttgcatctggctaacagttcggtggtgcgctatgcgcaattatactccattccttctacgattgaagtttgttgcaaccggggaacaaacggcattgaaggctcgctgtctacggctgtcggttatgcggcagcttccgacaaactgaactttatagctatcggagatttgagcttcttctatgatatgaatgcgttgtggaacgtcaatgttcgctccaatctgcgtgttcttctgttaaataatggaggaggagagattttccataccttgccgggattggatatgtcgggtacctcacataaatttattgcggcagttcataaaacatcggccaaaggttgggcagaagagcgtgggtttctctatctgcaagcgcaaaatgacgaagaactggctgaagcgatgaaaactttcactcaaccagaagctatggagcagcctgtgctcttggaggtgtttaccaacaaaaacaaggacgcgcgcatgttgaagaattattatcatcaattaaaacaaaaatagattatgtcaacacaaagagagtggacaaccattagagaatacgacgatattctttttgattattataatggaattgcccgtatcacgatcaaccgtgagcgctatcggaatgcgtttactccgacaactactgctgaaatgagtgacgcattgcgcatctgccgtgaagaagcggatattgatgtgattgtgattaccggagccggtgataaggcgttttgttcgggtggcgaccagaatgtgaaaggacgtggcggatatatcggaaaagacggtgtgcctcgtctaagcgtattggatgtgcaaaagcagattcgcagcatcccgaaaccggtgattgctgccgtgaacggttttgccattggtggcggacacgtgctccatgtagtatgtgatttatccattgcttcggaaaatgccattttcggtcagacaggtcctcgcgtgggtagctttgatgccggattcggtgcatcttatctggcgcgtgtggtaggacagaagaaagcacgtgaaatttggttcctttgccgcaagtataatgcacaagaagcattggatatgggattggtgaataaggtagtacctttggaacagctggaagatgaatacgtgcaatgggcggaagaaatgatgttgcttagcccgttggctttgcgcatgattaaagcgggattgaatgccgaactggacggccaggcaggtattcaggagttggcaggtgacgcaacattactttattacctgacggatgaagcacaggaaggaaagaatgcgtttctggagaaacgtaaaccgaacttcaaacaatatccgaaatttccttaaaataataggctaatgaaagactggttgtgcagtaattagcagattgaaaagatattcattatggattgtaagatagatattattccccggttgctccatttcaagcgacccgcgggaacttcccggggaacatatactacacgaaaagtctggtatcttcactttgcttctcctgattttccgggtagagtgggaattggagaatgtgcgcctttgcctgcgttaagttgtgatgatctccctgattacgaagatatattaataagaacttgccggcaagtagaggaagaacagggaaaattggataaagatggtctatgcaagtatccttccatcttatttggcttggaaacggctatctggcatttctttgcagggagttgggctttgtccgatacggctttttctcgtggagaggtagggattcaaattaatggtttgatttggatgggagattttgatcacatgttatcccaaatcgagaaaaagatggaagccggattccgttgtgtcaaactaaagattggtgctatcgattttgaaaaagaattggcgttgttacgtcatattcgtacccatttctcttctaaagaaatagagttgcgtgtagatgcaaacggtgctttctctccgggtgatgcaatggaaaaactgaaacgtctgtcggaatttgatttacattctatcgaacagccgatccgtgccggacaatgggaggaaatggcccggctcacttctgaatctccgttgccgatagcattggatgaagagctgataggatgcaacatgctggaagaaaaaaagaaactgctggcaaccatccgtccgcaatatatcatcattaaaccatctctccacggaggaatatgcggaggggatgaatggattatggaagcggaaaagcaacatatcggctggtggatcacttccgctttggagtccaacattggtttgaacgctatcgcccattggtgtgcaacattcaataatccgttgccacaaggattgggaacgggtatgctctttactgacaatatagaagtgcctcttgaaatcagaaaagattgcctgtggttttgtaaatgatagtatttagtggtatttaaaggatattctgatgatatttgatcgacaacaacagcgcttgctactggaaggaaaagaatacacttttgaagatataagccaactgatagcaggaggagcagaagctcattcttctgcttattgggatttatatcttttcctgaacgaatggtttaatgattctcctgttattacagttcatacatcgggctccacgggtatacctaaagaactgatggtacgcaaggatcaaatgatgcaaagtgcacgtctgacttgtgaatttctgaatttgaagaaaggtgagtcggcattattatgtatgaatcttcgttatatcggtgcaatgatggtggtcgtacgttcattggttgcaggcttgaacctgattgttcgtcctgcttccggtcatccgttggcggatataaaagaatctttgagatttgtggcaatggtcccattgcaagtttataacacgatgcaggttcccgaagaaaaagagcgattaaaacaaacggatattctgattataggaggcggagccgttgatgaggctctggaaacggagataaaccatcttccgactgccgtttactccacttatggcatgactgaaactttgtcgcatattgcccttcgtcgtctgaacggagcatcggcttcagaacattattatccatttccttcagtaaaattgtctttatccgcagagaatacattaatcattgatgcccctttggtatgtgacgaaacattgcaaaccaatgacattgcacgtatctatcccgatggaagttttatgattctaggccggaaagacaatgtgattaacagtggaggaattaagattcaagcagaggagatggagaagttgctccgcccgtttattcctgtgtcctttgtcattacttcagttccggatcagcgcttagggcaggctgtcactttattattggcagatcagcccgacacagaagaaatcggaaataaactacatgaaatactggaaccttattatcgtcccaagcatatattgacaatagaatccattccgcaaacagagaacggaaaaataaaccgggcagagtgtcgcatcttagccaaacaaatgttgatgacattttaccctcacaccctcacaccttgattcaatccctttattcatcggtgtttcaagtgtgagggtagaggtgaggccagggtgagggtaactttttaccctcaccctggctcgtcttgttcccagctaatttatactatatttccctatatatcatacattgatacttaggtattcttttgttaagctctaatgttttacaagggctcacccatgtaaacaaatctgtttacaaccgtaaacggatttgttcacaactgatagcagggcagacgcattatattttttactatattctcgtttgtaatttccttactatattgttggttattaacatattatcatttgctaatgtcgattattttccttatctttataagatatattaaaacataaactaacatgaaaattggcataattgacctttgtaaacaaatagaagatcctaggatgaaccgcaaaaaagtacataaaatggaaactattatctatatatccattgctgctgtaatctgtggcgctcaatcctggaatgagattgaggaatttggcaatgcgaaaattgcttttttcaaaagtcgcatacctggtctggagttcatccctagtcatgatacttttaatagattcttcagtataataaagcccgagtattttgagttgatcttccgtaattgggtaaaacaagtctgtcaggaggtgaaaggcgttgttgctatagatggcaagctcatgcgtggtccaagccaatgtgacggagaacatactacgggaaaagaaggattcaaattatggatggtttctgcatggtctgccgctaatggaatttctttaggtcaggtaaaagtagatgataaaagcaatgagattacagctattccattgttaattaactctttggaactaagtggttgtattgttacaattgacgcgatgggatgccagaaagatataacccagaccattattgagcataatgcaaattatattatagctataaaggagaataagaaaaaaaattatcaactagctaaacaaatcattgacgattatcaggatagagatgaaataaccaatagagtcaccaggcatgtgtcggaaaacaccggacatggaaggattgagacaagaacatgtactgtagtcagttatggatctattatggagaaaatgtttaagaagaaacttgtggggttgaagtctattgtagggataaagtcggagagaacaatagtagcaacaggagaatatactcaagaggtcagatactatgtaacttcacttgataataccaaaccggaggagattgcatctgccatcaggcagcattggtctattgagaataatcttcattggcaactggatgttacctttcgagaagactacagtaaaaaggtgaaaaatgcagccagaaacttttcggtggcaacaaaaatggcacttaccatactaaagaatgagaaaacaacaaaaggaagcatgaatctgaaaagactaaaagcgggatgggatgaaaaatatttgtcacaacttttacaggaaaataatttttaatgcgtctgccctgcaactgatagcttatctgtccacacaagtaagcccctgctaactattaagcagagtgatataaacaacaggactaatacatatatagagtacgactgtttttcaaaagaaaggcatataccaggaagagaacatgaggatgtagattatgcacgaagaaataacaagagtaatagtggcatatactcctttaattcattacgtaaaagttccatcgttttttgtttatatcgattgatagacttcacgctaagattcatctcttctgcaatctctgtatgagttttgccttcaaagaaacttttaataaagaccgttcgatagttttcgggaagtttgtttaatgtctcatacaacattctgtatagctcatcaagagtatatatactatccggttctgtttcatagacaggagctttcttctgtatattttccgcatagctccattcatattcctgatgtttcaggaaattcaggcagctattttttacgcacattttgatgtaagctaatgcggtgttcgattgaagatcaaaagaatcagtatccagtttatcccataatgaggtgaatacatccgaaacgatgtcttcacgtgtttctttatcatcaacaaacctttttgcatacaaacaaaatggggcataatactcctcataaagttgtttgaaagcccgttccttagtctgtttggaaaaagatattttcattatttagaggttctgtagtttttcattttgctgcaaatatataataagataattatcaaagcctaattttcgattcttttttttgctttcaacactaatgaatagaaaataatcagatgaggctgtccttttgtatataggttgattgtattatatataaacgggattaaaatatgaaaaacaagttttttttattggctataaccttttgtttgccaatacattctcaaggagtttccaagtcttttattccgatggctgaaatacctgccggaagtttttatatgggaagtgacggattaggcgaagattttgatgaggctcctatccatcaggtaataatctctcgcccgtttcgtatgggaatcactgaaataacgaatgcgcaatatgaatcattccgtccggaacatcgggcattacgaggaaaaaacggtgtttcgctggaagatgatgaagcagtcgtcaatgtgagttattccgatgctgttgccttttgtgaatggcttagccggaaagaaggcaaaaactatcgtttgccaacagaagcggaatgggaatatgcttgtcgggcaggcacatacacactattttctacaggagacgggttacctgcagtttatcatcggaatcaaaaagtggttcgtgactttgatccggtatctttaaaagtagcccagactcctcctaatacattcgggctttatgatatgcatggaaatgtggaagaatggtgcttggattggtatgctccttattccgcagaaaagcagaaagacccggcaggaccgttgaccggagagtttcgggtcactcgaggagggagtcatcacaccccggagaaatacttgcgaagtgccaatcgactggctatgctcccggaagataaacattcccaaaccggatttagaattgtggaagcagatactcgtttgaatgtatcgggaacatctgcccctgtcccgttcaatcagaaatctgtagaaaatacatctataaaatggaaaaaagtatctgctatcacaccgatgtttttgcctccgataccatttgtggtacgtccggtatgtgattcgaataccccattttatctgcataatcatcagcctgcagttacgtggtgtgataatggagatttgctggcaatatggttttctgcaaatgaagagaatgggagagggatggtagtactcggttcccgcttgcgtgccgggcacactgattgggatgtggcttctttattctttaaagttccggatcggaatatgacaggaagcgctttgctcaatgacgggaaaggaaaattgtatcatatcaatggagtggaagcatcgggagactggcagaatctcgcaatggtactacgtaccagcacagataacggtgcttcatggagcactcctaaactgatagctcccgaacataccaaacgtcatcaggtaatagctggtacgattcgcacacgtgagggatggctggttcaagcctgtgatgcgggtcccggcagtcatgacggggcagctgttcaaatcagtaaagatggaggaaaaacatggtgcgatccttgggatggcgctcctttgccggatttcaaagaaggaggaacgggaagtacaatcgcaggtatccatgcgggaattgtacaattagggaacggaagtttgatggctatggggcgtggtaatagcatacggaataaagaaggaaagctccgaatgccaatgagcatatcagatgatatgggaaagacctggaaatatgtagcaagcgaactccctcctattgacggaggtcagcgtcttgttttaatgagactgaatgaaggacctttgctattggtttctttcacagaccatccgcaacgtacgcctttggaagaacgtggtctggaatttaaggataaaaatggaaatgtgaagaaaggatatggcatgtatgcggctctttcctacgatgagggaaaaacatggccggtaagaaaactactgacggacggtgaatatcgttttttaaacggtggagcatggacgggatatttcgaaatggatgaaaatcatgctgaaccacgtggctatcttgcaggaacacaaactcctgataatgtggttcatatccttagtagccgattgcattaccgcttcaatttggcatggctcgaaaaataaaataaaaaaagtttgtttttgctgtccttttccaattacttcagttgtattataagtgtaattacaattaaaagataagattttgaaagaaaatatggaaaatatgagtccggaatcattgctccgtaaagcacaagcattgggagatgatattaaagaaatggaatccattgatgtattgggtgcctattatcaagcacaaaccaaaataaaaactaatagaagaaagaacatgtataatcaactgatgcgttatgcagcatttctgactatacctttatttctctcttctctggttttgggatatttatattttagtggaacagaaaccgacgagaaatatgcagaggtggtaaccgctaccggttctgtcatacgttatgaacttccggatcattctgtagtatggttgaatgcaggtagtacattgcgttatcctaccactttcaagaaagacaaccggttggtagaactgaagggtgaggcatatttcgaagtgcaggcagacaaagatcgtcctttctatgtaaatactccgaatggcttgagcgtatatgtttatggtaccaaatttaatgtagctgcttatgaggatgataattatatagaaacagtattggaaaagggtaaggtaaatgtgataacccccgatcaggaaacaatcgtattggctcctggagaacagttgctttacgacaaacagagtcaaaagtcgaaaaaaaataaagtggatgtctatggaaagatagcttggaaagatggaaaactaattttcagaaatgcttcattagaagaaatcctgaagcgtctggaacgacatttcaatgtagaaattcagtttaacaataggtctggaaaagaatataagtaccgggctactttccggactgaaactctgtcgcagatattggattatctggccaggtctgccgatttaaaatggaaaattgaagaaccgcaacaacaggcagatgatacattatcaaagactaaaattagagtagatttatattagagtagtaacccttaaaataaaagcccatggaataacacaagagaataaaagaaaggaagaaagctgctaccaacagctgtcttcctccgaattttccagattcacggtacaaggtctcgcaaacactagccggaatcaaaccatagttcatttagtaataaactttagttagccacaaatgtatgaaaaaaaatcattcatttacagcattatgtcctaaatatgctttaaatctaaaacttcctttagttatgaggattagtctagcactacttttcgcagtagtattacaactttctgccgaagatggctatgcccagcgaacgcgggttgccatttcaatgaacaatgtatctgtagaacaggtactgaataaaatagaggagacgtccgactatgttttcctttataatgataaaacaattcagaagaatcgtattgtttctgtgagaaacaattcaggtaagatcctggatattcttgatgaggtatttaaaggaaccaacattacttatacagtggttgataagcagattatcttgtctaccaataaattgaatgtaacagagcaagatccgactattcaggtaaaaggtacagtgaaagatacaaaaggagaacctttgatcggagtgaatgtgaaagtaaaagggacaactaccggtgctattacagatttcgacggaaactttcagattcaagctaaaaagggagcggtattggagatctcttatattggatatgcttctcaagaggtgaaggttacagataataaatcgctttccattgtgatgacggaagatgcaaaagtcttgaatgaggttgttgtaacggctttgggcattaaacgcgaaaccaagtctttgacatacaatgtgcagcagattggcggcgacgaagtggcaaaggcgaaagatatgaatgtgatgagcagtcttgccggtaaggtggcgggtgtgaatatcaatgcaagttcatccggtattggaggcggtgcccgtgtggtaatgcgtggtacgaagtctatatcaggtaataacaacgctctatatgtagtagatggagttcctttggctaatatatcaggtgaacaacccgacgatcagtatacgggtgccggacaatccggtgacggattggctaacttcaacgctgatgatatagaatcaatttcagtacttagcggatcggccgccgctgcactatacggttcggctgctgccaatggtgtggtacttatcacaacgaagaaaggagctgtagataaaaccagattgacttacagtaataattcaactttctattcaccattccgattgccggaattccagaatacgtatggttcggaaactggagagtggtatagttgggcatctaaattgtcatctcctaccgattatgaagttaaagatttttttcagacaggttacaatgtagcaaacactgtaagtctgactacagggacacaaaaaaatcaaacctatgtatccgtaggtgctgtgaatgcccggggtatcattcagaataatgacttggacagatataatttctctgttcgtaacacgacctctatgctgaatgataaactgacgatggatttaagttttatgtattctaatgtaaaggaacagaatatgttgtcgcaaggagagtatgccaatccattggttcccgtttatttatttccgcgcggtgatgatttctcgaaatatcagtattatgaacgatatgatgtagaccgtaacataaaaacacagttctggccattgaaagaaaatggattatccatgcagaatccttactggattacgaaccggaatatgtataccaacaagaaagaccgttttctggcaagcggttcactaaaatatacgataacagattggttgaatgtttccggacgcgtgaaactggataaggaaactatcaactcggaaaagaaaatgtatgcttccactttgaatgtgattgctgaaaactcggataaaggagcatacgtgcaatcgaacaagaataccagtcagatatatgcggatgccatgttgaatatcaataaatatttctatcacgacacatggaatctgacagcatctttaggtgccagtttattggatttggattataaggaacttaattttggcggcggattgctgaccattcctaatctgtttacttctaacaatgcgaacgtttccggtaaattaacctataaaaatacgaactatcacgaccgtaccaattctttattcggaacattctcattaggatataagggcatggtttatgtagatggttcgttacgtaatgactggatatctgctttggcaggaacaaaccattcttccatattatatccttctatcggtgcttcagcgattctgactaatatgtttacaatgaaatctaacattctttcttatgcaaaggtccgcctttcatatagtgaggtgggtaatgcaccggaaagattcagggctatcactacttacgcagtgttgggagggttgaataccacttcttatttcccgataaaagaccttaaaccggagagaactcattcatgggaaggaggatttaatttaggtctgtttgataataaactgacactggacgtgacagcttataagacatatacggagaatcagctcttcagtccggaaatttctacaacaaccggatattctaaattatatgtaaatgcaggtaaagtaacgaataaaggtattgagttagctcttggctttaaacagaatatagggcctgtagattggaaaacaactttactatggtcgctcaacagaaaccgcattgaccaattactccctgaatatacaaatgaagagttgggagtgacagtacatctggacgaaatggatgtctattcgttaggcggtgccaaacagcggctaacagtagggggctctatgggagatgtatatgtgaatacaatgagaactgatgagcatggacatatctggatgaattcaatgacgggtacattggaaacagataagaataattatgtctatgctggtaataccaatccgaaatatactcttagctggagaaatgaatttaattggaaaggaatcagtctcggatttatgttgaatgcccgtgtaggtggtatcggagtttctgccactcaagctgtaatggactattatggagtgtctaagacatcggcagaagcgcgggataatggtggcgtgaaagtaaacggccagatgattgatgcccagacatggtatcagactatcggagctaatggtacaggttatgtaggttctatgtatgtatatagtatgacgaatgttcgtttgggagaattgacattgggatatgatattccgatcaataaatggtgtaaatggatttctggattgaatgtgtcctttgtaggacgtaatttatggatgctatattgtaaggctccatttgacccggaatctactgcaagtacaggtacttataaccagggtatggactatttcatgcaaccgagtttgagatcgatgggattttctgcaaagatttctttctaattggataacctttaaaaaaaataatgatgaacatacgtaagttttttaaagtaaggaactactacttactccttggagtaatcatgataaatgtaggttgtacaaagaattttttggagtacaataccaatcctaatgaagcaaccgatgagatgacggattgggataatgtgagaactggttctcttcttttacagatggagcagaacgtactggtggtagcacaaccgggacttaatatcggttcggacagatatcagactgtggaagtgatgggtggagatggttatgtcggctattttggttttcctgctcccagtatcaattctgccggtcgttacaattgggataaaagaagttggtatggtgatatgttcactaccaattacctgacgactatgaatgcctggcgtgaaataagaaaagcgattaacaatgacgaagatccccggttttctatggcacaaattctgaaagtagcggcaatgcatcgtgtgacagatacctatggccctattccttatttgaattttggagtttcaaaagaagtgccttatgattcgcaaaaggatgtttattacagattctttgaagaattggatggagctatcaataacttggatagttatgctgcatccggaagtaaagttttgtcatcatgggattgtgtgttcaacggtgatgttacatcttggataaagtttgccaattcacttcgtttgcgtcttgcattgcatcttgcctatgtggatgaaacaaaggcaaaaagtgaagcccaactggctattggcaatagttatggattgatgaatgtgaagtctgatttagcagaacttcagcatattactccgatagcgacttatgaaagtcctctgtatattctgaaaggatgggatgatatttgtatgggagcgacgctggattcatacatgaatggttatcaggatccacgactttctgcttacttcgaggcaggtacgggtggaaaatatcggggtataagagccggaatgtcaaaggacgtaagtaaggataaatatataacaggaatctttgccgaaccacaggcaaccgctacttccaatgtagtgtggatgcgttcatctgaatcatatttcttgttggcggaatatgctttgcgttggggaacgaatgccgatgctaaaaagtattatgaagatggaataagaatgtcatttgatgaacatggtgtatcaggagctgacgcgtatctgacaagaactgcggcgggtggatatgtgcctgccaattatgaggatccggtgacatcatctcattccatggatgctttggggactgtttctatcgcttgggatgaatcgggagattttaaaacaaatctggaacaaatcattactcaaaagtacattgctctttatccggtgggacaagaggcatggacagagttccgccgtaccggttatccgaaagtatttccggttgttgtgaacgaaagttccggaggttctgtagacacaaatatacaaatccgcagattaccttatccggaatcggaatataatacgaatagaacagagttggataaaggcatcacacttttaggtggcgtagataacccgggtgtcagattgtggtgggatgtgcctaataaataattggttacttaaataatgcagaatatgaaaagaaattatgtatattttttgttcacctatctcttgacatttgttgtgagtggttgtgatacggatattgaaccggaagttatacaggcagctaatacttataatgaagaatattatcagaacctgcgtgaatataagaaaacagatcatgctatttgtttcggctggtatgccggttatacttcagaagcatctccttcgcaggggcttcatttcactggtctgccggatagtctggacattgtcagtctgtggtcaggtattccttccaacaatccggcttatgtagaaacgagttattataacgagcgttatttgccgactgcttatgaggaaatgaattatatccgtacagtaaaggggactcgcgttgtgatgtgtacgatttgccgtattggaagtacggagtttcctaaaaccgacgcaggtatcgaggcttatgctttgcatcttgcgagatgtgtgttgcgtaatgatctggatggtttggacttggactacgaaccggaaggcgactggttgcaaaatgataactttacaaagtttataaaggtattgggaaattatttcggtcctcaatcgggtacaggcaaattattaattgttgacttctataatcagctgcctcctaaggaaacagaaccttatgtcgattattttgtacgacaatgttacaccaccggtagtgctcaaagtttgcaatctaaatttgaccagcttagcagctggtgtcctcctgaaaaattcgttgctacggaacaaatgggatggtactggcagaatggtggagtcgaatttacggaagccgatggaaataaagtagattcatggggcaatccaatctattctgtaataggtatggcacgctggaatcctacacaaggacgaaaaggcggattcggtggatattattttgaatatgaatacaataccactcgtcctgctaatcaggctataggtgataaagagaaagccgctattccttattatagccttcggcgtggtattcaggaacaaaatcctgccggaaagcctgtacaacagtctactaaacaagaaacggaagaagaaaatggatgaattttaaatttgtatgcaaggtatgaaaacattgaataatataaaaaagatatggggagctgctttgataggaatagcttcttttatgctgctgggatgccaggaagccgctcaaaaaggtgacgggttgttaatgaccggaacatcttcggatagattggtaaagttcgccattgatggatttccatctgcgtatgctgtttctgtgacttcaacttctcgcgttgaatcggatattcaggtgaatctggctgttgatgcaagtctggttgatacttataatgaggaaatgggaaccaattattatcccattccggataaatcatatacatttgaaaatccggaggttactatttcagcaggacaggcaatttcttctgctgcctctctttcaattgccgatgattcggaatttgttccgggacgtgtttatttgataccggttaccataaaaagtgcgacgggagatttggatattatagaagcagggcgtactattttcctgaaagtatctcgaacattgcgtttccatgctccgtatgtaggacaggcttctatggcttatcaatttttgcttccggatcctattccttctttgcctacttatacatgggaagtgaagatttacgccactaaattccgttcttccggagcttccggtactacccgtgtttgctcatttggaggtagtgaagcatctgtagaagggggagcgattgatgatggaggctttaaatgtgaccagaacctgcttcgttttggtgaaggaacggatgaaccgaaccagttgcatgtaacaactaaacagggtaaaatgtcatcgaatactcgctttgctttaaatacctggtatgctgttgccttggtaaatgacggcagtacgttgacattgtatatcaatggagagaaagataactcaatgacagttgctccgtatgaatatgcgctttatggagtacagatcggtatgccttcaaaaggttatcaatcttcacaattgttttatggtcgtttgagtgagatgcgtctttggactcgtcctttgtctgctcgtgaaattaaagcaaatgtatgtggggtagacccttctaccaatgggcttgtgtcttattggagaatgaatgaaggagaaggaactactttctatgatttatctccgtcaaagcgtgatatcagttataagaatggaatcacgattgactggacttatgatgatacgaataaatgtcttgaataaggtaataataaatgaatagactgtatgataatgaaaaacaatataaatagattaactctccttttgcttgttttattgggaggagtaggattcacatcttgttcggatgatgacaatgattttattgaattgccgacaatagagatgccacagtcggaggcaggacctgtttctattgattatagggagatactggatgcaggaagctatgtctatgattatactatcaaactggataaacctgctgctactactttattgtgtgacattgccgtggacgaaagtatggtagaggcttataacgctgcaaataacacgtcttataagatgatgcccgcttttgtctatgagttgcaagctaaaaatgcgatagtgaaggcaggacagcaagaatccaattccttatcagttaagttttcatcattgttcggtttggtggaaggtgaagaatatttgcttcctattgttgcaacaatagatgaaacgtgtgtaggacaatttgtaacggacactcgttctgtttcttattttacgattagcattgatggggaattggattatataccgggattgaatatgagttcttattcaacggatatgtatcgtacgttaagtttcgcaaatgatgaagtagttacgattgaagataatacacatacgtttgaaatgcttgtatatccatataattggcacagtggaactaattatataggtacatggcgtggtaaggataccaacaataataatgaggtttttagtggttgtgaactacgtgtaactggtgcaacgggagcgtctaatattggtaatcgtcaatgtgacttgacattggctaatcaaaatataacgttgccggctaatcaatgggttaggttgactattacttgtgacggaacgaaaacgggccagaatactgaggttgcttatcgtttatatattaacggtgaggaagttgcttctgcaaaacctactaaacgttggggaccatcctcttctcaaagattcaaggtgggatatacgttgactggtattcagtttggtaatacaagttcaagtatgtattttgatggtctgatttctgatattcgtatgtggaagaagtgtctgacagcggaagaagtaaaagctaacttgcgtacaatagcttctccatcttcttcggacttatatggctattggaaattggatgaaggagaaggaaatacattgaaggacagttcgggcaatgggcgtgatttaactttcccggcttcggcaaatatcatttggaatgcagaattcaatgatttgcctcaagataattaaaatgtgattttatattgggagttattgtgtttttacgtagctcccaatattaacttaaagaaatgatgatgaaacgttttatgtcagctttgatcgttttactgtgctctattgttggcgtatgtgcgcaacaacagggaagagctgtattgcgttttgatactactacttggaattttggtaatattcaggaagtaggaggcaaagtgagtcatacttttcattttactaatatgcatacttctccggttgtgattgaagaagtgatttcaacttgtgggtgtgccatttctgtttatagtaaacaacctgtaaaaccagggcatacaggcactattaccgtaactttcgatcctaaagggcgaacaaactttttctctaagagtataagggttgtttctaattcagggcaaagtgtcaatactctttgggtaaaaggcacgataaatacaatgaatcgtatagaggatgaatatccttattctttatcatcagatattttggcagaccgaatgactctatcttatgatctgttacaacataatgggaggccaaaacaattggaaattagaatctataaccgatcggataaaatggtcaggttgtcatactcgctgttggataagagcggatgtttgtcgatttctatgccatcatctcttcaaggtcgatcttatgcgactataaaaataacagcttctcctttaaaaggcttttacggtacatttaaagataagattattattagtgccaattccgtacacagttctcctatacaaatctttggtacagtgattgatgatatgagaaaagtaagcacggcaactgctccccggatgaaatgttcacaatcttattttaatttggggaatatctcattaaaaaagcatattcagcgaaaagtaaaagttactaatgaaggggcgaatcctcttattatccgcaagatagaatgtccggaatttgtttctactaatatccggggtgaaaaggttttgaagcaaaatgagtgtctggaggttctgtttgaattaaatgtatcatcttcaaaccatctattggatgcaaaggtcaagttgataacaaatgatgctcatcaacctgtacatacagttatatttgaaggagaaataggtaagtaggattgaatatctctatttgaaagattagaaatacactataaattaattgagtcattttactgcatataacattatgataaaacgattgtatatcttggtgatagtacagatggtatgtactttggggtttactcaatcctctccctcgttacctgcttacaaagatcgctgtttgtcgatagatataagactttcagatttactttcccgcatgactttagaagaaaaggtcggtcagttactttgtcctttaggttgggaaatgtatgaaatccatggtagtgaagttcatccttccgaaaagttcaagcaattaatcaaagaaaggaatgtaggaatgctttgggcaacctatcgtgccgatccttggacaaagaaaactatagcaaatggacttaatccggaactggcagcaaaggcaggaaatgcattgcaaaagtatgtgatggagaatacccgtctgggaattccgatgtttttagcagaagaagcccctcatgggcacatggcaattggtactactgtttttcctacgggtatcggaatggcggctacctggtcaccggagttagtaaaagaagttggtcaagttatcgctaaagaaattcgttcccaaggtgggcatattagttacggtcccgtacttgatctgacccgtgatccccgttggtcccgcgtggaagaaacatttggggaagatccggtattaagcgggactttgggggcggcaatggtagatggattaatcaacggaaatatttcccggaaaaacagtacgatagctactctaaagcattttttagcctatgccgtaccggagggcggacagaatgggaatcaagctttagttggaatgagagaattgcatgaaaacttcctaccgccttttaaaaaagcgattgatgctggtgctctttctgtgatgacttcttataattcaatagacggaatcccatgtactgccaactcatatttgctgaatcaactgttgcgaaatgagtggaagtttagaggttttgttgtttccgatttatatagtattgaaggaatatatgaaagtcattatacggcttcttctatagaggatgcggctattcaagcagtttctgccggagtagatgttgacttaggtggagaagcttatacgaatatttatcgggctgtaaaagagaaacgtttgtcagaggctattattgatgaagtcgtttgcagggttctacgattaaaatttgaaatgggattgtttgaaaatccatacgtagatccccaaatagcgattgaaagagttcgtaatgcaaatcatattgccaatgcacgacggatggcacaagcatcggtgactttattaaagaataggcatgacattctgcctttgagtaaaaacatccgtaaagtagcggtaattggcccaaatgcagataattgttataatatgctgggtgattatacagctccccaaaaagacgaaaatataaaaacggtactggatggaatcatttctaaattatctctttcacgtgttgagtatgtaagaggttgcgctatccgtgatactaccaacaatgaaatagcgaaagcagttgaagctgctaatcgtgcagatgtggtgattgcagtagtgggtggttccagtgctcgtgattttaaaacgacttataaagagacgggagctgctattgcagataaaagccaaatcagtgatatggagtgtggagaaggctttgatcgtgcaactctttctttgttaggaaaacagctggaattactagaatccttgaaatcaacgagaaagcccctgattgtggtttacattgagggacgtccattaaataaaaattgggcagcggaacatgcagatgcattgctgaccgcctattatcccggacaagagggggggatgccattgctgatgttttatttggtgattataatccggcaggtcgcttgcctgtttctgttccccggtcagagggacaaattcccgtatattataataagaaagcccctaaatgtcacgattatgtagaaatgtctgcctccccattgtattcatttggatatggattaagttattcaactttcgaatattccaatttaaaagtgacacaacaagcgcctttgcattttgaaatatcatttgatgtagaaaacacaggaaagtatgatggtgaagaagtggctcaactttatattcgtgatgagtatgcttctgtagtccgggcacttcggcaactcaaacattttaagcgtttctttttgaagcagggagagaaaaaaacaattgtattcactttggtagaagaggatttatccattatcaatcaaaaaatggagcgaatcgtagaaccgggaagcttccagctgatgattggagcagcgtcggatgatatcagattatcaaagacgatttctgtgaaataagttaatttgctcatatagtgtcaataatcatgacactgtatgagtacactatagaaatatgattatgtcatcatgttcaagaagaaaatatattttttctatttgggttggtaatgacccttattagaacgacttattggcgtggtagatgactggatgacataaatatatttatttttatcgttgttattatttgttttttttgataaaagcgtttatttttggctctcataaaaaataaatctaaccggacgatctttgatgacacacataaaagaacaagaaaagaagagaaaatttgaacaatttttcattcttacttttcctaaagtaaaagctttcgcatggaaaatcctacattcggaagaagatgcagaagatattgcccaggatatattcgtcaaactgtgggataatccagagatttgggagaataaagagacatgggatagctatatttatacaatggctcgtaatcagatttataacttcctgaaacatcagtccgtagaacttaattatcaggaaaaactatctcaagaaaattctccttcttatgaatttgatatgtatgataagctttatgcaaaagaactccaacttttaataaaacttactttagataatatgccagagcaacggagaaaagttttttctatgagccggcaaagaggaatgagtaatcaggaaatagctgataatctgcagctttccgttcggactgtagaacgacatatctatttagctttgcaagaattaaaaaaagtcattttaattgcattttttttctgtttctattgagtagtctgttttagctagttgtctatatattataaggcaacagaaaaatggagaattatattcaaaaaataattagtgtattcacagcttccaagcatagtgagaaagtaattgaagaagtgcatcaatggctggtggataaagagcattctgatgaaaaagaggctgctttacatacactatggagtgaaactgacggtaaagctgatgcgggtacatgggcttctctttctaatgtatataataagataggtgcaggtcaacaaaaaactgtgcgaaaattccgaatgcagatatggcaatatgcagcagttgcagtagttgtactggctgttgctatttcaggaactttcttttatgctaagaatatgtattcggaagttgctatgatagaaaaattcactcctgctggtgatatgattacaatcgaactacccgatggaagtaaagtacagactaattccggaaccttattactttatccggaagctttcaaaggagatactcgcacggtatatttggtaggagaagctaattttaaggtgaaaaaggatccggagaaaccatttattgtgagatcgggaagcatggctgttacagctttggggacagagtttaatgtgggtgcttatccggaaagtaatgaaattgttgcaacattacttcatgggaagataaaagtagattgtgatgaagaaagaagaaactatatactacatccgggacagcaaattatatatcaaaaaaatagtggtcaagtagtgttagctaatgctgatgtagaagctgtaacagcttggcaaaagggattgtatatattccgcggagatacgatgaaagaaatcatagctgaattggagcgtcgctttaatatcacattccaatgtaataccagtcatttcagtaatgataaatataattttagtttccgtaaaaactcggatattggagaaattatggatattatgaaagaagtagtaggaggatttgattataaaatagaagagaatgtatgttatataaaactgattaagtaattatcttacaaatattttgtttaaccttaaatatcattgattatgtaaaaaagtatccggaaaaaggatgccgcctgattccggatatgaaatgacttttttagtattaaagctaccggcttaaatctttgatgaatataatattatgagtttaacactaaaaacgctactaagatatgaatttatatctattaaaagctaaatgtataacatttttttgctgtttgctattcgcgcaaacagtgctctttgctcaaagtaatgtgaaaataactattaagaaaaatgaaataacattacgagaagcattgacagaagttgagaaacaatctaaaatgtccgttgcctataatgaatctcaacttggaggaagtaaacgtatttctttgaatgtgagtgaactaccgttagaacaggcactcaaggtcatattaaaaggaacaggatttagttataaattaaaagatagctatatcatgataattccggaaaaaaaggaagagtctgtatcaaaggaaatacaaggtcgggttgtggacgaacaaggagaagccttgattggagttaatgtttcaattaatggtggtagtggtggtacaataactaacctgaatggagattttacaatccgtgttaccaaaaacgatttcctgaaggtttcgtatatcgggtatacgactcaaatggttaaaatatcagataagactgtttataatattacaatggcttctgacacaaaggccttggatgaagtggttgttacagcattgggtattaagagagaagctaaggcattgacgtataatgtgcaggaaataaaagctgccggtataacaaaagtgaaagatgccaactttataaatagcctttctggtaaggtagcaggtgtgactattaatcagagttcgtctggaactggaggatcttcccgcgttgtcatgcgtggtaccaaatcattatttggtgaaaacaatgcgttgtacgttttggatggtattccaatgcaagggttaagaaccaaacaatcagataatttttatgagtcagtggaagtggccgacggagatggaatatctaatattaatccggaggatatagaaagtatgtccatcctgactggtgcttctgcagcctccttatatggtaatagaggtgcgaatggtgtgatactgatcacaaccaaaaaaggtgcgattggaaaacccagaataagttattcaaatagcactagtttttcaagaccttttattactcctgaattccagaatacgtatggacgtaaagaaggtgaatttaaaagttggggggataaattagagaaaccttccgattataatcctttggatttctttcaaacaggatttaatacaatgaattctattgctgtatctactggtacagaaacaaatcagacgcatatatcttttgggtctgtaaattcagaaggtgtcattgataataataaatataatcgctataattttacattccgtaattcttgggacatcgttaaagacgttttaagtatggatatgggattattttatatcaaacagaataaccaaaacagtaacggacaaggtatgtactataatccgttggttccagtctatttgtttccaccaagtgatgatatgaataaatatgtagtttatgaacgatatgacgctgatagaaacttcaaaactcaatattggccttataaaaatcagggattgggtatgcagaatccatattggattattaatcgtaatatgttcaatactgatagagaccgctatatcatgtcattatcaatgaaatggaatataaccaattggcttaatattatcggacgtgcccgcgttgataatgcttatactgatttcgaacgtaaattatacgcttccactgatggtttgttctccaaatctcaaggtaactatatgacacaggaagacaagaatactgcaacttatcttgatttcttagtaaatatagataagaaattcggggagaattatcacttgttagtaaaccttggtggtagttattatgatgaaaaatataaatcaagtacttttgaaggcaatctgcttggagtaccgaactttttccatccaagtaatataccttcaacagaaagcggatatagcaaacaatcattgcatacccagactcaatctctatatggtaaagcagaactggggtaccgcaattttctttatgctgacgtgacaagtcgtatagactggttttctacattggtaggtacttccaaggaatatgtattctatccgtccgtaggtctttctgtagtgttgtcagagattattccgcttcctaaaaaagtattctctttctggaagattcgtggttcctatgcgcaagtaggtaatcctccaagtgcatacttgccttatgcaacagtggttttggaaaatggtaatgctacaagtgctaacttctcacctgccaatcatcttaaagcggaaatgaccaaagcatttgaatttggtatggacttacggttgtttgataataaattgaaccttgcagcaacatattacaattcaaacacatacaatcagttgtttaaatatgaattgccgcccagcacaggatacgcttttgcatatgaaaatgcaggaaaagtaaacaactggggtattgaactaagtgtaggttttaatcaggatttaggcccggtaaattggaactcaaatttgatttattcaatgaaccgtaatgaaatcaaagagttacttcctgagtatgtgactgaccgcactactagtacaacagtaaaatcaccaacagaattttccgttgccagtgcagattcatacagaatgattttgaaagaaggtggtactatgtctgatatctatgcgacaaaattgaaacaagacttacatggtgatattcttatttcaaatggaggtgtatcggctgaagaaaatactttcataaaagttggttcggcagctcctaagtataatctaggatttagaaacagtttttcttggaaaggggtggaacttgattttctgattgacgcgcgtgttggcggtgaggtgatttccgctacacaagctttgatggatcaattcggagtatcacaacaaacagctacagcccgtgataacggtggtgtacctgtaaataatggaaagttggatgcagaacaatattatggtaccgttgcttccggaaaaacaggtttactggcgcattatgtgtacagtgcgactaatgttcgtttacgtgaaatgtcattatcatatatgcttccggcaaagtggttcggagaaaaattaaacatttctctgtcactgacaggacacaatttgctgatgttttataagaaagctccgtttgatccggaactaacagcaaatacaggaacttattatcagggtttcgattattttatgccacctagcttacgcagtttcggttttggtgtaaaagttaacttttgattttaatactttaatacgaagaataaaatgaaaaatagaatctataacgttatacaaacttgcttcctggtgtttgctgtttgctttttattgggaagttgtatgtctgatacgattaatctggatcctgataaagttcaagaaaaagaattggataaagataatttatggggcagctatcttactacgatgcaacgtagggtagtatctgaagatgttaacttgtttcaacgctcggaagacctttttggcaacatgtattctggatattttgccggaacgcaaaattggggcggaggagcgaatggaacgacttatgctatttctgacgaatggaaagatgcaccttttaaaagtgcatttgtagagttcttatcttcatggaatattttacgccaaaaggtagactctgcatctgtattgtttgctgtcggtgaaattgtaaaagtgacagctatacataaaactacagatatgtacggtccgttaccttatctaaagtttggtctgactaatcctgtcccttatgattcgcaagaagctatctataaatcttttttcaaagaactgaaccatgctattgatatcttgaccaagtttgatcaagctaacccaaattctaaggcattggaaaagtttgatttaatatttggcagtaacatacctaattggattcgttttgcgaattctttgaagctgcgtttggcaatacgtttaagtgctgtttatccggaggctcaaaaagaagcagaagctgctgttacacattcgtatggagtgattgaaacaaatgataataatccggcaatgcaatctaattcaactctttcgttcacctatcacaaccctataaatagtattagcagcgcagacggctatgaagaagatgtaatgggagctagtatggatgcttatttgaatgggtttggagatccacgtatatccgtatttttccaattgtcttcaaatgacaattatcgtggattgcgtaacggacataagaatggtgatatatttaaaggtgatttaggactctccaaacctaatatattgcaaggaaccccttatgtttggatgacagctgcagaagtttattttttgcgggcagaaggtgccttgaagacatggaacatgaaaggaaccgctaaaagtttgtatcattcaggcatacgtgcttctttcgaacaacatggagtaaaaggagtggaaacttatcttgcaagtactaaagtgccggcaaaataccctggattcaaaagcagtccttccgcaccagccccatctgatgttacgatagtctgggatgaaaatgataaagaaaagcagttagaacagatcatcacccaaaaatggatagcaatgtacccattaggacaggaagcatggagtgaattccgcagaacaggctatcctaagatctatgaaatagttaataatgagagtggtggtgttattagctcttctgtacagatccgtcgtgttcctttcccctattccgaatatcaaggaaataaagaagaggtggaaaaagccgttaaactattgggtggtccggataccggagctactcgcttatggtgggatgtagaaaataagtaatcatattcttttagataaaacgacatgaagaaattattaacatatataatagttttcgtaatagttggtacgggaattatatcgtgtaatacagatatagaagctttggatatagtggtgcctgataagatgtccaaagaatattgggaaaatttaagagcatataaagcaagaaacgaccatgaagtcttttttggctggtttggcggatggacggctaactctgctgatatgatcaactatttaagaagtgtgcctgacagtgtagatattatttctatttggggagcttaccagaacttaagtccggcacaaatggaagatttacgttatgtacaggatgtgaaaggaactcgtgtcacatatactatctttgctcacaaaattccagatgaatttatgtctggtgaaaatcatgagattgctactcctgaaggaatagaagagtatgccaagtctttggtagatactatgtataagtatggttatcagggtattgatcttgattatgaacccggctatcaggaatttcctggggttccgttcagtggtcctttagtaggtccgtcttatatgtggcctgattatatggataatatggaaatgtttgtaaaggcattaggaaaatatattggtccgaagtcgggaactcgtaatctattaattattgatggagtaccttatcatttaaagcaaggattggctgaatattttaattatggagtggttcagtcttataattctaggggatatcaagatctgcaggggcgtttcgataatgcagctaaaaatggttggaaaccggaacaatacatttttgctgaaacctttgaggggggtaagtatgcaaatggaggagtagatcactctttaagagaaggcgggtcggtaccttcattagaaggaatggcacgtttcctccccatgtatgaaggaaaattagccacccgcaaaggaggatgtggtacctatcacatggagaacgattaccgttccaatcctaattacaaatggacacgtaatgcgatcagaataatgaacgaacattaaagtttagaaaaaatgaaacagaatataaaatacatattattaagcttgcttgtccttctaatggtatcatgccagaaaagtcaggaatactatgaaggattatatgttgttggcgcagatcaattatcaccggttgctaatctgacaattgatgatttgcctgcagttatcggaattaaagttgcttcatcatgtgcgataggagatcatgtagaagtgggtatgaaggccactccggaattagtggagtctttcaataaggaatataagaagaattatgaacttcttcctgaaaagtcgtacaagttggagaatacaacattaactattgaaaatggaaagaatacttccacagatggtgtgcgtttaagtgttatcagccgggacttattaaaggaaggcaaaacgtatctgcttcctataagtattgtgagtgtgtcggataagaatttgtccgtaatagaaggttcacgtaccatatacattgttatcaatcaaattattattactcaagctgcggatatttctgctaataacgggtatttcaaggtcgatttcagaaaagaatctcaatacaataccacggcattgaataatgtaacatttgaagcacgagttcgttttaaaaagatgacttctaccagtggaaaatggtgcttctctgttatgggattggaagagaatttctgtttgcgtactgccggtgataataaaagcggttggaaattgcaattgagtggaggtagtccggcaattgattccagagatgttttacccaatgataaatggttgcatttggcttgtgtatatgacggttcacaaggaaagaagtttgtatatgttaatggtgaattacagggagaacttccggatacaagaggtactatcgatttaacgcaagcctatggacatgataaaaatgcagcattctatattggtcagtctgcagcagataatcgttatatggatgggtatgtaagtgaagtacgtgtatgggctgttgctcgttcggctgctgatctgaaaaataatgtctgctgggtggaccctttaacagatggtttagtggcttattggagatttaatgagtctactccggataataataaagtaataaccgaccttacaggaaacggatatagtgctacttatgccggacgtggaacgctcaattttgtacaaggagttcgttgtcctgataatgctgctgaatagcaaaactatatatccttataaaaggaaaaatgaagaaatagataatggtagactgactaaaaagtcttcctatatataatagaagatgtcccgattgcaaataagcaagaccgggacatctttttattttaattacttgctattataagcaaccaacatccaaaccaatttttcctgttctttcaaataatcgctcatcatcgaaacggttacttcgtctccggcttgagaagcgatagacaaaatcttacgttcttcgccaatcagataactgatagactgaaggatattattcaatgcttcgtctccgttgcttaccttatccacttcattcacatttgctacttttagataatcgctgaatttattggcaggagtaccacccagcatcaagatacgttctgcgatttcatccaccttttcagccgtgtcatcatacatcttttcgaattgactgtggagtacaaagaaattatgtcccttgatattccagtggaaaccgcgaagattggtgtaatacacttggaagtctgctaatagttgttgcaaagatgctactacgttgtttgctcccgattcgttcagtttgataaattctaaagttttcatattcttttatttttaatgatttatacttgctttcttttttttctgtactgcaaagataaggcggaaaatgcttgttgtcaaactgaaaatttctatctttgcatagatgaaatctataacttaatatgatttgatagatgacaatacaacaattagaatatatactagctgtagaccagttcaggcatttcgcacgggcagctgaatattgccgtgtgacgcaacccactttgagtgccatgattcagaagctggaagatgaactgggagtaaagttgttcgataggacggtacagcccgtttgtccgacagccattggacagaaagtgatagaccaggctcgcgtgattctggcgcaggcagctcaagtgaaagaaataatcagtgaagataagcagtcattatcaggcgtattccgcttgggagtattgccaactatcgctccttatttgcttcctcgcttttttcctcaattgatggaaaaatatcccgaactggatattcgtgtcacggaaatgaaaacacaggatattcagcaggctttgcatgccggcgatttggatgcagggattattgccagtaaattagaagacacatttttgacggaagaaactcttttctatgagcaattctatgcttatgtatcacggaaagaaccctcattcaaacatgacgttatccgcacttccgatataacaggcgaacatctttggcttttggacgaaggacactgctttcgcgatcaactcgtccgtttttgtcagatggaggctgttaaggttaatcagatggcctatcgtttgggaagtatggaaacctttatgcgaatggtagaaagtggaaaaggaatcacttttattcccgaactggcagtgatgcaattgacagaagaacagcgacaattagtacgcccgtttgccatcccccgaccgacacgacaggtggtgttggcgacaaatagagattttattcgtcacagtctgctatgcgtcctgaaagaggaaataaaggcggtggttcccaaggaaatgctttctttgcagcccatacaatgtttgttatagtatattagagattgagatgattcctgctcatcttttttgattggcaggagtctttttacacttatcttagctcctttaaaatagaaagagctgacaatgattatcatccccatcccccgtaccgaatatcaaatgtttatccgttcaaagaatggaggccaatatgacatgaagaaggtctttttttattttaataaataaatgttcgttcaaaaatgctgcaaagatagtcattattgtacatataaatttttattcagacctaaaatcctatatttggcgaaacaactatttatatttagtgattatgaaaaagtacattgcagaaatgattggaacgatggtgctcgtccttatgggatgtggtagtgccgtttttgctggtggtttggctgatacagtaggcgctggggttggaacgatcggcgtagctttagcctttggtttgtccgtagtagcgatggcgtatgctatcggaggtatttcgggatgtcacattaatcctgctattacattaggagtgtttttgactcgtcgtatgaatggaaaagatgcaggtatgtatatgattttccaggtaatcggagctattatcggctcggctattctttttgctttagttgctaccggtgctcatgacgggcctacagcgacaggttcgaatggttttggtgatggagaaatgttgcaggcatttattgcggaagcagtatttactttcatttttgtattggtagtgctcggctctaccgattcgaagaagggagcaggtaatctggcaggacttgccatcggtttgactcttgtgttagtacatattgtatgtattcctatcacagggacttctgtgaacccggcacgtagtattgctccggcattattccaaggaggagaagcattgtcacagttgtggttattcatcattgctccatttgtaggagctgcattgagtgcagttgtttggaattatctgggagataagaaataactcttttagaagaaagaatataaagaagaaagtaaaagggcggcagtttcacaactaccgccctcttttgcgtaattaatatattatattaaaaaagagtgtgtttcgcatgttcacattagattagtcgtctaagtctaaggaaatttcacttcataagttttcggcccgccataaatggtgttgacacgaattcttagtccctttttcccctccatccggtttttaatcttatccagtttgaaagacacatatccttcacccaaacgttgaggatcatctccttcactgttatgacggaattccagattgatatattcgtcctccgcattgccttcgtcagcagtgggagcagtctcttctttgtcattaatcaccagattcaggaaatgttttttatcttcactatgtgttccgtaatattggaattcaatcgtcagatatttattatccttattgatccacatataagtcgtgttgatcttatcatctccgattttctcttcgtcgttgtcatcttcacccattgtgacgatgtctttggttaagattggattgatacctttcacctgaatattaaggtcgtatccattcacaggctcttccaactcgttgaatatcacaaaagctctttgtccctccacccaatcttcattgttccatccttgtgagttgctgggatacatctttttcccgtcatccaaagtgaaataaaattccttgctatcttggctaatcatattgatggtgctgatagccagaagatcggacgaattatcatcgtcgtccaagcatgactggagaatcggcatggtagtcataatagcaaagataaaggctatgaatttaaatttcttcatatacttactaggttttagattttataatatttatgttttctgtagtgaaaatgcaagaggatagaaaatattgcattcggatctgttaaagaaacaaaagtgataaaagagttgttctctctatgcagtatttctatctttgctgcatttataaggtaaacacgtgtataagagaatggaagaaatagagttgtcggaacaatgtaggctgggtaataatcgggcccgcaaggaactgtatgaacagtatgcggggcgtatgcttggcatctgtctacgctataccggcgaccgggatacagcccaggatctgcttcacgacggttttttaaagatattcgattcgttcgataagttcacctggaggggtgaaggctctttgcgagcctggatggaacgggtgatggtcaacacagttttacagtatcttcggaaaaatgatgtgattaatcagtcgacacctttggaagagttgcccgaagaatatgaagagccggatgcttccgatgtagaagcgataccacaaaatgtgttgatgcagtttattgaagaattacccgccggctatcgtactgtgttcaatctttatacatttgaagacaaatcgcataaagaaatcgcacaggtattaggtatcaatgaaaaatcttcagcttcgcaactgtttcgtgcgaagagtgtattagcaaaaagagtaaaagaatggataatgcataatggatagatagagatggaagagaaagaattgtggatgaataagttgaaggagaagcttgcggattattccgaaccggcgcctgcttccggttgggaacaactggagaaagaacttatgcctcctgtggagaagaaaatatatccttatcgaaaatggatgatggctgctgcagctattataatattagctgtcgtttcgtcagtaagtctgtattttctagggacacccgctgcggatgaaatacgtcatatacaaactccggcattggcttccacgcccgatgcattgccgggtgtgcaacaaccggatatgcagggaactgctgtggaacctgtcttacggccggtaactcgcgaagatcgtttggcgaaagtcgacaggaatcatacggagcagaaaacaggtgtagatccattagggatcggtaatgaaaataaactttcaacaggaaatggagaagactctttgagtgaggaagataagaatgtaaaaggaaatggagaaactgaaaatgtaaaagatgaatcgaagcaggcagaaaatacagatgtcagtcagggacagtcacaggatacagagcgatcgaataacagaccgcgtcgtccttccggtaaagacaaacttcatattccgacagaaaaaagatcttctcaaaagggaacatggtcaatgggactttcggtaggaaattcaggaggtgcttcaacagaagtaggtgccggatctcatgcttatatgtcacgtgtgagtatgctttcagtttccaacggtctgatggagacgattcctaatgaccaaacattggttttcgaagatggagtaccttacctgcgtcaggcaaaacaggtggttgacattaaacatcatcagcctatttctttcggattgtccgttcgtaaaggtttagctaaaggattctctcttgagacaggactgacttatacgctgctttcttcggatgcaaaactggcaggtgaagaacaacagatagagcagaaactgcattatatcggtattccgttgcgtgccaactggaacttcctggataagagactcgtcactctttatgtttccggtggaggtatggttgagaaatgtgtttatggaaagctaggatctgaaaaagaaacagtgaagcctttgcagttctcggtatccggtggtgtaggtgcgcagatcaatgcaacgaaacgtttgggtatttacgtggaaccgggtgttgcttattatttcaatgatggctccgatatacagactatacgtaaagagaatccgtttaacttcaacatacaagcaggtgttcgtctgacttattagtacgaactacttcactaaatatagtaacgccatccggttcggataccgtcactatcctgattggatagcgtcattatcctgaccggatggcgttactatttgctatttactatctttttcttcagaaaagtcggataattgagaaaatattaataatattgtcacctgtttatgacctatggctgcatacctttgttgcaaaattctaagatatggtagattctacagatgaaaaacatttattaatcgacttaaaaggcggttcctttcaggcattcgaaagattgtataatatgtatagtggcaaactgtacaatttcattatgcgactctcttccggcaatcaatatatggccgaagaagtggtgcaagccactttcattcgtatatgggaagtgcatgaaaaagtagacccggcttcctcgtttatctcttttctctgtacgattgccaaaaacttattgatgaatatgtatcagcgtcagaccgtagagtatgtttacaatgaatatctcatgaaaagtagcgtagaccgtgattcacagacagaagagaatattgatctgcgctttttgaatgagtatatcgattctcttgccgaagaactgcctgcgcaacggaagaaaatattcattttgagcaaaaggcagaattacacaaataaagaaatagccgaaatcatgggaatttccgaaagtacggttgctacccaattatctttggctgtgaaatttatgcgtgaacagttgatgaagcattatgataaggtaattacccttttgttggccttttttgttaatgaaatgtaatagtaatacttgtttttggatgggaagtaggatgaaaatgtatacttgtaaataagtggaaagatggataagacacattataaagagctaattgaaaaatatttcgaagaaacgatcacggatgtcgagataaaagaactgtcagactggataaagaatgaccgtcagttgcatgactggtgggaacaagagtttgagagatcggattcctccatgaacccagtgttgcgtgataaactttttgcccggatcaaagaagagactttgggcaaggaagtgcgccccctccgtatcatcccttggaaatgggttgctgccattttattacctgtctgtgtcgctttcttcacttactatcttttagattcttctccaacggcagaaacaccctttattgtgaaagcgggcaagggagataaagcaaccatcgaattgccggacggaacaaatgttgttctcaattcagcttcccaattaagttacctgaataacttcggagaaaatgtgcgtcgtgtgcaactaaatggtgaagcctattttaaagtagcccatgatgagaaacacgccttcattgtgcaaatcggtgatttggaagtgaaagtgctcggtacttcttttaatgtatctgcctatgaagatgccaaagacgtgacagtcgttcttttggaaggaaaagtaggggtctatgcgcagaaaatatcgcatatcatgaagcccggcgacaaaatagaatataataaagccactcataagataacagccactcaagtgcatccgaatgattatattgaatggacgaaaggaaatatgtactttgagaaagaatctttggaaaatataatgaaaaccctttcacgcatctatgacgtagagattcgtttcgactccaataaactacctaatgaatatttcaccggaaccattccgggaggcggcatacagaatgcgctgaatattctgatgctaacttcacctttcttttatgaaatggacggttcggtgatagttttgaaagagaaattgtagaaaaaataatgaatagagccattccgaagcccactacttaggaatggcttttttgttctctgaattgaataagttaacgagagttaaagtctgataggcgattggacgagtgagtatagtagtctgtatacctatcaaacaacttaaaagttttgatatatgaagcacaaaacaacctttgaaaaactccctcaaacaaacgtggggagaagtaagaactggaaaacactgcgggctatttgtctgctattgtttttaagcgtctcttttaccgcttattctcaaataacggtgaatgtgaaagacatctctttgagagcctctttaaagaaaatcgagcaagtaagcaattacaaattcttctacaatgagagccttccggagttaaaccaaaaagtttcgttaaatgtgaaagatgcaacgattgaacaaaccatgcaacaacttttgggtaaaatggagttaacctacaagaaagagcaagagaatgtcattgtattgattcgtaaaccacaagaaaagcagcgtaatataaaggtttcaggaaccgtagttgattcgaatggagagcctattatcggtgctagtgttgtggtcaagggtacatctaatggaacaataaccgatttagatggtaatttttccatcaatgatgtctctgaaacatctcaactaacagtttcctacatcggatataaacccgttcaacttcgtgctaccgataaaaatatggcgaaagttgttctgcaggaagatagtaagatgattgaagaagtcgtagtcgttggctatactcctatgcgtaagagtgattttacaggttctttggcaagtgttaaggctagtgaattatctctttcagcagcaactgccggacaagctttagtaggtaaagtcgctggtgtacaggtgatgcagacaagtggtgcgccgggagaaggagtgaagattaaagttcgtggaacgaactctctttcagctagtacaacacctctctatgtgattgatggatatccggcttcagaagatgtatatatcaatcccgaggatatcgaaactattgatgtattgaaagacgcagcttcggcagccatttatggttctcgcggtgccagtggcgtggtacttatcaccacaaagagggggaattcaggaaaagcccgtattgattatgactatcagtttagtatgcaacaagtagagcgtaagattaagttgctggatgcctatcaatacagggatttggtgattgaagcccgtaataattcttatcgtgataaagcagaagctgctggaaaatcatggaacccattggatgataatgcaataagagcttcaaaaggttttaacttgaatgaagtgggcatttctgatttgttttttgatttcacaaccggaaaaccggtcgatcctacttacaatacagattggcaggacgccatctatgggaatgctccgatgcatcgtcataatctatctgttacaggaggacaggatttcttgaaatatcgttttagtttgggttatctggatcaggatggaattatagctccttccggacataagcgtttgaatgttcgtgccaatgtagatgcagaagtcacgaaacgcttgaaagttggagtaaacttttcttttgttgatgtttcggaacgacaggttcaagcagacggtcgttatataaatgatggtgtcgtacaaagtgctctattaatgtttcctcaattccctgtatataattcggatggaacttatgcagtcggaaatcagattgcgatgaaagctgatggctatcagatggtcgagaatcccgtggcacttgctcatgaaattgatatccgcaacaagtcaagccgaatgaatttcaatgctaatatcacttatgatatattgaaacagcttcagtttaaagccaatttgggaactcaatattatacttcccgttataattactatcgtccgcgtactgtaggacaagatggtgatatgcccaattcggatgctgttcaggcacgtgtgaaagctcgtgacataacaaatcgtgatattgaccgtttgggagagtttacgttaaattataatggtgaattcgggaaacatcgcctgaatgctttagtgggctacaccttacagaaaaaaacttatgaccgcgtagccgttgaagcaacaggttttcccgacgaccgtattcatgaagtgacagcgcatggtccgaatgcttccgatataggcttgtatagcagcgatacccgaaaggctgcatggacaatgatgtcttatctggcacgtgtaaactattcattcgataatcgctatgtagtgacgggtacagtaagaactgacggatcttcacgttttggaaaagaaaaccgttggggttggtttccttctatttctttaggttggactatatcgaatgaaaagttttatcaggatttgttaggtaataattcatccttaaaacttcgtgccagttggggattgagtggaaacaacaatattggtaactacgagcatacagctactatgtctcaaggtggttacgtatatggtaatactgtcgaaacagcctattggcaaggaactttcaaagatgcggctatcggatgggaaaaaacatcccaatacaatgtagggtttgatttgggattattcaatggtcgtgtcaacttgataggtaactattataatagtctttcgtatgatttgttgtacgaccagcctatatcatccatatcgggctcttccagtgtaaaaacaaacttgaaaaatgcaaaagtacgtaatagcggagttgatttccaaatagacgggcgtattttgacaggagattttaaatggaatgtaagtgctaatatatcagtaaatcgaaataaagttgtcgatttgggtggtattaatgatttgtatttagttagtgagcgcaatgtggtaagccatgtgacccgttccgggcttcctatcggctctttctatggctacattgctgatggtattatttccgagaaggattacaccaatataatgattgataaaagcaatctggttaatggcaaatttcctgacggatatcagttgataggaccggcagttcctaattataataacatacatccgggagatgtgaaatggcgggatgttgataagaatggtttgattacagaaaacgaccgtgaaattctaggcaatgcttacccggattttacatacggtatcagtaccgatttctcttataagaactttgatttgagagcgacatttaccggttctcaaggagctgaagtaataaacttccagaaatattatctgtacaatatggaaggctccggcaatcagttggcatctgttttgaaccgttggcattctgacgaaaatccgggttccggcggagtgtttcgtgcagcgcgtagttccactcctaataccagtcagcggcttagttcttatatggtggatgatgcttcctatttccgttgtgcaaatatcacattggggtataattttccggtgaagtggatgcagaaagtgagcgttcaggcgttgaggctatatgtcagtgttgacaatttattcacattgaccgattatgaaggatataatcctgaagtggattataaaggtaataacctgttacccggttttgattggggggtttatcctttggcacgtacttatagtataggagcaaaaataactttttaaataaataaagaatcagattatgaaaaaatacatagtatttatcgcagtaagttcgctattgttttgcagtagttgtacgagttttctggaagaaaccaatccaaataagattccggccagtactttctatcagaccgaagatgatattgcaatggctgcgaatggtgcgtatgcagctttgagaggaaacgggtattataagaatatgtatttatacacagatgttcgttcggaaaacaccacgttgcaggatccgggagcaggaaatggggttaattatcaattttataactatacattgacaacagataatgcacaagtgaaaactcattgggcagatttgtataaatgcgtgacaagagctaatataatattggatcagatagatgatattccttttaaggatgaagttgtgaaaaaccagaaaaaggcggaaatgtatttcttgcgtggattgacttattttcatcttgtaatgcagtttggagatgtccctatcgtaaccaaagaactaaagacgaaagatgaaattcagaaatatactgcccgccagccaaagagcgaagtctataatttgattatttccgatttgacacaggttattaatagtgaattgccggatattcaaacgggtaatggggtaggccgtgcttcaaaagctgctgcgtatgctttattgggcaaagtttacttgacaatggctgctgattctgattttcagtcggaaagaacttcaaatctgcaatctgcgaaaacaaatttagttgcagcatggaacatgaaaccttttacaagcctgaaagatatcccttatgctgatgtttttgataaggaagctcaaacattctgtcaagagaatatttttcaggtgatgtataaaggaggcaactccagtttagcctcaaattacgcctatatatttcaacccacttcccagacggggcttacttcgcagaaaacggggacggggaataatataccgacgtctgatatgatgagtgcctatgaatcgggagatacgcgtaaggctatctcgtgcggtacgtcacagaacgttaattatgtgaagaagtacacagatctcgatgacataaatggctatggggcgaataactggattgtgcttcgttatgccgatgtcgcattaatgttggcagaagtgaaaatgcatttgagcgagaatgatgcggtaagctatttgaacatggtacgcgaacgtgctggtctggatgattattccggcagtagtttgcgcgatgcgatccttcgtgagagaagagtcgagtttgcttttgaaggacagtattggtatgatttgttacgtctttattctcgtcaggaactgttggagcacatgaaagcgaagaatccaaatttctctgcgaaagattttttgttgcctatcccgtatgatgaacataaactggatccgacaagaatgtatcaaaatgaaggatataactaaaaataaaatagtatgataagaaaaatctcaaatatcatttatatatcagtattagcagtcgttttatttgcttgtggggatgatagtacgattgaagaacaggggagtggaacgattactgctagagttatggcaagtaatgcctatccggcattagaagagaaagttgttctgaaggtagctcttaatgatgggcaagacatccaatctgtggtttggacgatggaagggcagacattgggtgaagaacctgaattggaatatacgtttacgaaagaaggaagttataatatttcggttagggtgacagataagactggcaatgtagcggcggctctgcagaaattacaagtatccggcaagagtttacgttatgctttgcaacactttgaccctgcaaaagtttggataatggggcatcgtggcaattcttccaacccgaatattcccgaaaattcgatagctggaattgaaagttgtatagaattagggggagctgtagatattgtagaagtagatcctcgcatgacaaaggatggagtaattgtgttgatgcatgatgaaaccatagacaggacaactacagggaaggggaaagtgaaagatttgacttatgagcagctccagtcttatcgtctgaagctggcagacggcacagtaaccaatcacacggtcccctctttgtatgacgcattggttgcagggcggggaaagatcttttttgatttggacttcttgaataaagtgtctcctaaagaactgtatgatgttgtgaaaagctgtgggatgttagaccgtgtgttcttttatacatctaataatcgggatgtcttgcagaatattttggattattcgccggctcctataccttatccgcagtgtgaaaacgaggagcatgcagatttcctttcacagcaaccaggagtgatgtttgcccagatatctttgtcgaaaacattaaatggcgggctctcgacagccatatcttcaaaagggctgtttgtctcgactaatatgttagatatgaatggttatacctatgatacacagatgacacaaggaaactatacaggagtggacttgattttgtcgaaggggattaatttgatacagacagaccatccccagttgctggatgcctatctgaaacagagaggtaaaagataattggttttaatcttaaataatgaatagaatgattatgaagaaatatatattcctgatagtgacagtcgtttgtctatttgcatgtaaggacggcgatgaagtgcggcagacaacctccccggaggcttctttttctatagataaagaagaatatacggtcggtgatatcgtttatctgactgatgaatcagtaaagacggaaggagagatagtagagtatttctggcattttggatttgagggggaagggaatagggctactactaaagatgcgtccgttttgtataagagggctggaacctatgttattaaattaaccgtgacagatgaattcggaggatatgcaactgcatcccatactgttgtgattcgtccgacgaatatgcctccggttacaaacttcagctatagccctgccatttgtaaagtgaatgagaaagttcaatttaccgataagtctgtggatgaggatggagaaattgtttcttacgagtgggattttggcaatgggcagacttctcaagaaaaagacccggaaataactttcacgacaacaggatttgtaactgtaaagctgacagctactgatgatcgtggagctacaaatacaaagcaagctactttatacgttcgtgatacttctatatccggagtaactgtcctttgggataagacgtttgaggtatcctcttctttacggtctatctctcctgctgtaggtgacaacggggatgtatatgtgtcatccaatgcactccacctttttgcttattcgccgtctggagagcaaaaatggatgtttgatttaagtaaggacggaggagctggagatcaaggttcgtctcctatgataggtgcggacggaactatttatatgggtgcgagtacaacagacaaaaacataagcagcagtctgtatgctattcatccggatggaacacaaaagtggagatatgaactaggtattggtactaatattccctatatttctcccgctttgtctcgtgatggcaatatcttgattggaaatagagggaccgatggttctgtacacatggttgaccgtagttccggcagacaactttggagacgcaaatctcccaatggtggtgctaatggtggtatatcggttggacagaatggagttatctattcagccttgtcgggagcgaacggatttgcccgtactacgcaagatggtgtgaacttgtctcctaatctagggaaaggaaatacggctgctgctgtatatcccgctattgatgcgcaaggaaatgtatatgtggcattttcagagggagtggttgctgcttatgataaccagggtaatgagctatggagatatccggcgagtggtactatgggcaagattgaccagggaggaccggctatcggtgctgacggaaccatctatgtgggtacaaagaatccgaatgcccaagttgttgccctgactaaaggaggagcaaagaaatggagttattcctctgtcgctgaaataggaacaacaccggctatagacagtgacggaaatattcacatctgtgatgatggcggtaactatataatattgaatgctgatggtacggagaaatataagagacaattaggttctaaaatttggtcgtcaccagtcattgctgactatggtattgtgtatgtcacgtatgaggataatggtgcctgcaaattgatagctattgattgtggtattgaagggcctgcaaattcaccatgggcacagcgcggacagaatgcaaaaagaaatgctttacaaaaataaaaagatatgcttagaaagataaatatattaatagctttaacccttctgataataggagggttagaggcacagaatcattcggataaaataattgcgaatctacagaagcctgcaagtaattcagttttagttgtttctcatcgagctgactggcgtaatgctccggagaactccctgcaggctatccagaattgtattgatatgggggtagatgtaattgaaatcgatctgaagaaaaccaaggatggacatctgattttgatgcatgacaagaaaattgatcgtactacaacaggaaaaggttatccggcagactatacattggaagaattacgtcagttccgtttgaaaagtggtacagggcataaaacagctcatttgataccgacattggaagaagtaatgtcattatgtaaaggtaagatccttgttaatattgataaaggctatgattacttcaaagatgtatatgctgttttgaaagaaacaggaactgttcagcaatgtattattaaagccggacttccttatgaacaagtcaaggctgaaaacggtgatgtattggataaggtaatcttcatgcctattgtacaacttcataaagacggggcggaagctgtcattgatagttatcagacacatatgaaacctgctgcttatgaattagtgtttgatagtgacagtccggagattcttaatttgataaagaaagtacgtaatacaggctctaatctttttataaatacgctttggcccgaactatgtggcgggcatgacgacgaccgtgcagtagaacttcatcagccggatgaaagttgggggtggataattggccagggagccaagctaattcaaacagaccgcccagctctattattagagtatctacgcgaaaagaaacttcacgactaaacgcactttcttcatgttgaaacaactaatcaatttttacaaggtctcttcgccgagaccttgtaacggagaagctttgtcttcatccgatgctcgccgtctgaagtttctgaaatggtctactttcctttctgcgacttttggttacggtatgtattatgtgtgccgtcttagcctgaatgtcgtaaagaaacctattgtagatgaaggcattttttcggaaacagagttaggcatcataggttccgtattgtttttcacctatgccatcggaaaattcacgaacggtttccttgccgaccgtagtaatatcaaccgttttatgactaccggtttattgataactgctttggttaacctctgtctcggttttactaattcttttatcctgttcgctatcctttgggggattagcggctggtttcaatctatgggagcagcctcttgtgtagtagggctttctcgttggttcacggacaaagagcgcggttcatactatggcttttggtctgcgagccataatatcggcgaagcgttgacttttctgataatagcctcaattgtcagtgtgttgggctggcggtatggtttcttcggagccggtatagtgggattgataggagcgttgatcgtctggaagttcttccatgatactcccgaaagcatgggatttccttcggtgaatgttcccaaacagaaaaaggaaatgagtgagacagaaacggctgattttaataaagcacagtgtcaggtattgctgatgcctgccatttggatactggctctttcgagtgcttttatgtatatcagtcgttatgctatcaatagttggggcgttttttatttggaagctcaaaagggttactctacattggatgccagttttatcatttctatttgtccggtctgtggcataatcggtactatgttttcaggtgttatttccgataagttatttggtggacgtcgcaatgttcctgcgttaattttcgggttgatgaatgtgtttgctctttgtttgtttctcttagttccgggagctcatttttggatagacgtgttggcaatggttcttttcggtttaggtatcggagttttgatctgttttctgggtggtttgatggcagtggatattgctccccgtaatgcttcgggtgctgcattgggagtagtcggtattgccagctacatcggtgccggattgcaggacgtgatgagcggtatactgatagaagggcaaaagactgttcagaatggagtagatgtttatgacttcacctatatcaattggttttggattggtgctgctttgctttcggtgttgtttgctttgctggtatggaatgcaaaatcaaaagaaatggattaaagtgagtacattaggttagaatataagtctttgttttcgaggtattagacaccattccgggaagtaagtaatgattgcttatctttctggaatggcttttttataatcaattaaatagaaagttttatggaaaattcattgaatgatgaattattgtgttcattgaaagatgaacttcgtgaagtaaccgcacaaatcaatgtgcatagtgaaaaattaatggatctgctcgaccaaaaaaaagaatcgtcagtcaactgactcgagagatgtcgcatctcacgcctgtcatcatcgagtatcggggaaatccgaagcaatatgtctctgttgtgctcgatgccatcaatctgggtaggttgacgtatgacggagtagcaaattgcgaacagacttttcgtgcgttagcaagcgttgtagatgtgataagccctaagaatgggaaaacgcttagtgtagagacgctggtgtcttatgagaagaaaaagcgtgctggagaatttgaggaaaaataatataaaataaaaagacgattgttgtatagttgaacaacaattcgcatatttgcagtatggaaagcctcaacgtaacctccgtacatacggaggttacgttgaggctttcatggagactttaaccgaaaaggaacaagataaaatccagtatggactactcttgttgaaaacacaagaaagactctccactaaatttgtaaaatttgttcaggacggagtttttgaacttcgtacagaatataatggtaatatataccgggtatttttcatatttgatgatggaaatattgtagtgttgtttaatggctttcaaaagaagtcgcaaaaaacaccgggtagtgaaatagataaagcattaaaaataaaggaggaatattatgcagataaacaatcatcaaatagtagattatgacgctgttcttggtgcgaaatttggagcagaaggtactcccgaacgtgcggaagcagaagaaaaagcgtatgctttctataccgggcaaattatcgaagacgcaaggaaaaaggctaagattactcaagcagaattagcccggcgtatcggttccgaccgttcttatatttcaagagtggaaagtggtcagacagaacctaaggtttctaccttctatcgcatcatgaatgcgttaggttgtaggatagaattttcgatgtctttataagaagcgattaaaaaaacatggtgggaaatttgaaaaagataactgtctttttcaaatttcccaccgtttttttgaggaagaaaaaggaaaaggtgagggtaggtgagggtaaatttctaacattcgtattttttttagaagaaaatagaagaatagaaataagaaatataaaaatgaaaagttgcaaaagtaccctcaccaaccctcacctttttgcgtgcgaaggagatgaaatcttattcatatagcctgtttgatttcacctgttccgtatcaataatgaatacagtgtatcttctcccgttttttcccttatgaaattcgaagccgtgtttggacatcacttttcctagttgggctttggttccgtgagaatattgataccccgtccgttcgcgaatcaattccgcaatttcagtgaccgtcagataatgcaccttttcgaaacgttccggtttgcggatatgtgtcaacaccagttcttcttccggtgagtggaaaatgaaatcctcgttgttctcttcaatccgtgagttttccgactgggtgaaccaatactgataccccggcttgttgagcagatacttgatttgtgcatacaactgcgcgtagtttattttgataaactccatcgagttgacatgaaagcagagaaaacggcggttacctgtggtgtcgtgaagcacttcctggtaattgcatgtgccggcaaaagaagccgtatgaggaaagttttgcgaacgccgcgcgtatggcaggcggatgctgattactttgcgggtaaccaaatccttgaagatattcagttcccgtccgttcatcccttcaaactcatccagattgataagcatcgcctgcgctattttggccagatcatccttgttgttcgggttgataagaccggtagaaagataggcgcgcaattcgggcggcagcaggttgttgataaacgtagtctttccaatgttctgtatttcgctgcaaagcaacaaaacagtgtggttcaccacatcatcttgtgtggcggcagcgcacattcccaccagataacgttccagacattctacccaaaatttctggtgactagtatgcacgctgttggcaaggataccgatataatccgttccgtcccattcaggcagcgagtctaaatactcgcgaataggatggtaagtgctgctgaagtcggagtagatcagattctgaatcgttttgacggtgcacgaatagcctagttcgttcatctccatccaaatgctgttttccatcatttcgtcgagaatatggaaaggttccggttgctccgtgtccgttttccttctgcgatattccatgatatgaagcacttcgttgtagcgtgtatcgtaattttctttgatatgttgctcaatctgtaatattcgcttctgcgtactattcagcttgcgggtgtcgaattcctcgttgtgtccgtaagcactcccgatcagtgcgtccatttcatccgcgggaagatcggtgaactggctcttgataaaagctgccgcctcttcctgggggacgccgtagcgattgtacatacaagccaggcaatgcaggtagttgttccggttgccggtgacgtacttttcggatttattgtgataatagttcagagtcaccattaaggaagcgtgcgaggaatggtagttgagtgccacttgttcggtgaggggattgttgtctggtgctgtcgtcttcttctttttgccggatgcccttttcttcttttgagacttgaagaacatcggtggctgttccacgatgacagctgtggcatcgggattgaaataaatatccggatcgtaagagaacaggcaagtacggctgacatcttgtccggaagtgtcgacctcaactccgcagagctgggcataaaaggaagcgattttgtgataagcggcatgatggaaatcttcaatttcctgaatcgtttcgggcaatgtcccgtccgtccggcatacacgtaccacgattttcagtcccattcctttgggactgatgaaagcgatgcgggtgtgggcacacttttttgccagtgcgaggatgcgtgccaatgcttcctgtgtctgatggtcgatgtctaccacgatgtatcccagatacttgacgagagttgcgtttgaacgtcctccccggtagttggctgaaaaggtgatttccggtagttctattttcttttcgttggctgctttctcgccttgttccgtgaagattcggcgcacgtcctccactgtttcctggtatgtgccgttgctgatggccgatacgatttcttcttctgtcatttcggctatgacgcggtaaaagtcttgaaagatggtaaaatgctccatgttggtttgttctttttaatttgcggttgcaaagaaatttgtttgtaaaataatagaatggaacttttcgtttttttgattaagttcctagggttctcccaaatagcgtatgatcgttgccacttgccggggagagagaaggcggttgcgggcacgatagccttcttgttcgagttcttgcaggagcggaaggttgtagacaatccaacgacgtagtatttgtaaggctactttgaggcatacgttggggttgtaaagatgagctagttccgactttttataagtgcggataagaaacggttggtccggataatacatgatgaatgatgtttgatttatgctataaagttactgaaaattaatggtttattaaaagaataacgtcattattattcatagagtatcaggaaacttcgttggggaatccggagggtggaaaatgtgttatctttatgtcgttaacaaataaggaacgcgttcgaaatgtgtgaaatcttaaaattattttattatggcaatgacagtaacttattcagtagtgccgcgcaagaatcctgccaaaaaggatgagtcggcaaagtattacgcgcaggcacaggcttcgggagagttggattttgaagagttgtgcgagggaatcaccagccggtctacctgtacggagacagatgtgcgtgccgccatttcgggtattctttatgaggcgaagcgtgcgttgaaagcgggaagaatagtccggctgggtgatttgggcagtttgcagatcgggttgaacagtgaaggagctgtgtcggtcaaggagttttcaagttcgctgattacggctgcccatattattttccgtcccggaaagacgttggcggacatcacgaagattcttagctaccagcaggtaacgacgcgtgcggtggcccaaacgggcggtagcggcaatgaaggagaagacgatgacaaaggttccggtggtggttcagacggtggtggaagcggagaagctccggacccggcagcatgataactttaatattggatcaaatgaaagaaattgtaactaagattttggatgtaatcatgttccttgtgcctttcttcggaaaaagaaagcggaacagaattgtgagagaggtgcgcttcaatgctacccataaggaagtgtgtaatgtgaaaacaacggaaagggagaaggacgatgagaaagattagtctgattgtgattcactgctctgctacccgtgctgatcgcgacttcacggcgaaggatgtggacactgcccatcgctttcggggcttttcttgttgggggtatcattattatatccgcaagtcgggacagatagaaccgatgagggatgaagatacggtgggtgctcatgcacgcggttttaatgcgattagtttaggggtgtgctatgaaggcggactggatgaggacggaaaggcagcggatacacgtacttcctgccagaaagaatctttgcatcgcctggtgcgcgaactgttgcagcgttatccggatgcaaaggtggtcggtcatcgggacttgagtcctgacaccaattataatggaattgttgacccttgggagcggatcaaagagtgtccctgtttcgaggtgaaagcagagacatggtgatttttatcctatttattactgtggtggttaattgaccaccacagtagtgaaatactctttaaatacctccgcggctttttcaagttgttcgggggtattttcttttacgtctttcagcttgtattcctgctccatcgcttcatacttatgtacgcctaatgtatgataaggcaggatttccactcgttgcaccatcttatattttcccagagcctctcccaagcggcggatatcctcttcgaaatcgctgtatccgggcactaatacataacgcagccagaaaggtttctcgttttcttccagccatgctgccgtgcggatggtttgctcgttacttcttccggtcagtgcttgatggcgtgccggattgaactctttaatatccagcaatacaagatccgtcagtttgaaaagttcttctacttcttcgttccagataccgccgttgctgtctatgcatacatgtattcccttttctttcagttcacgcactaaagggactagtgctttggcctgaaacgtaggttctcctccggagaaagtgactcctccgcgtttcccgaaaaaaggacgttggctcatagccatgcggacgatttcttccggtggggtaggtgtgcctccttttccggctatcgtgtcggggttggcacaatacaggcagcggaaattgcatccttgaagaaaaacgacgagccgtaagcccggcccgtcgaatgttcccatactttcgtatgaatgtacgtttatcgtcatattgagtagatctgattacatacgttcgtggaagctacggctgataacttccaattgatgttcgcggctcaacttcacgaagtttacggcataaccggaaacacggatggtgagttgcggatatttttccggatgttccatggcatcgtaaagcatttcacggttcagtacgttcacgttcaggtggtgagcgcctttggtgaaatagccatccatcattgtcaccagattttctacgcgatcctcttcagtagctcccagtgatttcggaacgatggagaaggtgttgctgataccgtcttgtgagtcgcggtaacgtaatttcgctacggaactcaaagaggcgatagcaccgttcttgtcacgtccgtgcatcgggttggctcccggagcaaaagcgacacctttggcgcgtccgtcgggagtagcacctgttttcttgccatacatcacgttggaagtgatggtgagcaaagataaagtaggacgggcattcttgtaaaccggaagtttcttcaattcttcgctgaagaaatagaccaggtcaacacccaggtggtctaccttgtcgttgtcattaccgaagcaagggaattcgccttgaatatcgaaaccttctgtcagaccgatgtcgttgcggcgtgcggttactttggcatatttgatggccgacagtgaatcgagggcgatagaaagtccggctacaccgtaagcaaggttgatgcgtgggtttgtatctacaagagccatttgggctttttcgtagtaatacttatcatgcatataatggatgatgttcatcgcttcgttgtaaacacgggcgatttctgtcaataccttcttgtagttgctcattacttcttcgaagttcagtgtgtcgctggttagtacggggatgtttttcaccattaccgtaccggtgttttcgcagcgtccgccgttgatggcaagcagcagggcttttgccaggttgcaacgtgcgccgaagaattggatttgttttccgatttcctgataagatacgcagcacgcgattccgtagtcgtcagactggcgcacttcacgcatcaggtcgtcgttttcatattggatggaagaagtgtcgatagatacttttgcgcagaattctttgaatccttccggcagttccgggctccacaatacagtcaggttcggttccggtgaagggccgaggttgtagagtgtttgcaggaagcggaaagaagtctttgtcaccttcgtgcgtccgtcgttgaggcgtccgcccagagattcggttacccatgtcgggtcgcccgcaaagatgtcgttgtaagattgcatacgcaggtggcgcaccatacgcagtttgatgacaaactggtcgatcagctcctgtgcgaaagattctgtgatagttcctttgctcaattcatattccatataaatgtcgaggaacgaagagacgttacccagtgacatggcagcaccgtcttgttcttttacggcagcaaggtaagccatgtatacccattgtactgcttcttgtgcggtgtaggcaggacggctcaagtcgagtccgtagtattcgcccattactttcatgtctttcaatgccttgatttgctctgccacttcttcgcgcaggcggatgcgggcttcggtcatcggaccggtaaggttacgcaagtcttctttttttgcctcaatcagtcggtcgataccatagagagccatacggcggtagtcgccgatgatacgtccacgggcatagttgtcaggaagtccggtgaggaatcccagagaacggaacgaacggatttcttcggtatatacgtcaaatactccgtcgttgtgcgtcttgcggtagtgagtgaatatatcttttacacggtcgtccacttccacgccgttttcgtggcaggctttgctcactacgttgatacctccgaaaggcttgatggcacgtttcagaagttcgtctgtctgcagaccgacgatcagttcattttctttgtcgatatatccggctttatgagaagtgatggttgagacggtgacattatccagtgagcgtacgccgttattggctctttcttctgccagtgcttcgaggcagcggttccatacagcttttgtgcgttcggtaggtccttcgaggaaagaagcatctccataatacggagtgatgttgtgactaacgaaatctcttacgttgatttctgtgctccaaagaccgtctttaaagatcttatttaattccataaatgataaaattagaggttgtagttatccttttctttagagcgcacaaagttacaacgttttttcatataatcagcataaatatgctctattttatgcttttcaacataaaatacctagatattgctattctttggaaatgatgttcgtgattttttttttgtgaaaactcttgtaagtttaaaatatattcgtacctttgcaccgcttttaacgaaaagcacttctgataaagaagttttggagaggtggcagagtggtcgattgcggcggtcttgaaaaccgttgtactgcgaggtacccggggttcgaatccctgtctctccgcaataaatgctgaaaatcagcaaattgcaaaacaaacacccagttttacacccaagaatgtaaagttgggtgtttttgtattatttaagcctttggtattatgctttggttaccggactgtatttttcgggtcaagtcaaaaagtatgtgggtataatatttgagaaacattgaaagtctgcaatgctaaaaacatacatccttccaaagtattataaatcaagtacatcaaacgaacacctgattgggcgtcagcattgtaactcagaggtcatgcttatcacccacagggttttcagattgaccctatttttcttgcggatagtctatttcggtacattcaatcctgaaatcttgtaatcttcgtttaatgatgccgatgccactaataatgaggtcttctttaagatgactgttcgcaatgagttcttcatatctctgaaaaaagaacattcgtatcccttcaaaccgctgaatgccacaaacgcattaggattgcatggatgtccggtaaaatcacattgtataaatgctctcattgtttcaaatattctaagagattatctaaatcttaattggcttctccttgtaatctaagcaaccattctttagtttcttcttgaattcctccgtgtggtcttggctgttccactcttcacgttctttcagactcttcgcaagtatgtcacttggatagtagcaagtggcattattattgctagtcttatcttgtttttcccagattccttcatagatagtcttgccgggaaaatctaaatcattcaccggcatcgtatgatagctaccgcatttcgggcatttctgcggagtactgagtgccatacaattatattctatatccaaagctttgaatatatgttcacaattgtcacaaataaaaatagatgtatctctaaacataatcgattctcctttctttaatggttgtttatatttcttggaataataattcttctattgccgacaaataatgacaaatccctatctttcttcataatgctacgccttttatcgttttgcattgcaaagtaagatagggagggggacaaaagtctccgaattgtttggtcaaaatagaattttacagttaattttctccttttataattctaatagcaggttcccatccggcttctgctgccttatagagatattctgtagataattcactgttccgttcaactccgacaccttcttgatacatccaagccaaatggaacatggagtctggctctcctagttctgctgccttttgaaaccagcaggctgcttccttttcatttttttcaactcccaatccgttcagataacaattaccgatgcagaagtatggttcagtgctttcctcatttgccgccttcaagaagtaattaaaagctttgttataatcagtaggtatccctccaagaccgtgttgatagacaatgcctatattatggtaagctctcaaatatccctggctggcagctttttcataccagtatagtgcagtttttatatcttgttccacaccttcaccacgccgatagcaaacacctaattcatactgggcttcaggaactccacgctgtgcagcatcgctgaagcatgcaacggctttgtctatatcctgttcagtgcccattccatggatatagcacaggccaagctcatacttagcttccggtacttcgtccgcagctactaaaaaacgctcaaaagctcgttcatcgctttggtatattccaagaccttctttatagcatactccttcataatagaaggctttcatatgacctaaagcggttgctcctcgcaatgagtaaaatccttttttctgcttttggggcttctcgctagatagtagctccagtccttcgtttaatagcttttcagcggtactctcgttttccatatttttaagaatgataacgtattgtttttttgatgtggttcgatattgttcaatgttttttgttatatttgatatataatgtgagctatatcgaactcgtgttatattgtatagttgagcaattaagcagcaattccaaattgtgctttcaagtcacaatactttattgacacttcatcactatactcttttactttctctaaagagccgcaattcacaattttcttttcgcaaatttctcttaatataatggtgcaattctttataaaatgtagatatttttcaggaatttcttcataagaggagtattcttttgcgacttcttctgtgaaatcttcgataaatggcacatatttactctttaagtcactgaatattccagaaatattatctaaagccttttgtaactcattcatccgattgagttcatttttcatttctgctaatacattattagcctcatctttaaacttttctgattcatcatgcaacttctttaaatcttttatagatttaaaaatgtatagcataggggttacaaccaaataagcatcattaagttcatagcctaatttctctaattttttatgatgcttctctactatgttaaagttatctgatatgggaaattctctatagtctaacacttccaaaggatagtctttaatatcgcttttaattccaacttttattaaagcatcagccaatttctttaaaacagcttctttaatgaccgctttgtttttattgatttcatcgataggatgttgaatgtcttttaaaagtaattcttcatgtttagacttatagcagttaaaattctgttttgcttgggcgattcttttttgaaggatttccttttcctttttcagactattaggtgtgccagtaagtaattttcttattttttttagctgtacttcaacaaaaccatcttcaggaaattctatgtgtttagctgcgtaagctgcggctcctaaagcagcttttgctgcaataccgaaaacaataggtacaaatgcattggcagctatattggctgctcgtttcgttaaattttctgtaatcataattataaactccaattagtattgttattatttgttgtttgaagtaaatttatgcctaacaatttagcttgttttattataatctcatttaataaggcatagttgctgcatgatacagctttatcaaattccaccatggatttattaaattccaatctttgttgcttgagtttatccatagtttttttagtcatttcagttgttgcatttttaatatctttaattctttcattaaaaatatcgtttattcttgcttgtctggtttctgctttggcattaaaaagatccattttatcaagagaaaacataaataataccgatgctatccccgacatcatagttgcaagcactacagaccacggttcaccaatgcctaatttgttaatgagtgcctcaattcctattccacaaatagcaatcacactacctcccaaaatcttgataatggcatctcccttttgtgcaggagtcatttgtttagattgttctccaaacagaatttttcctgcttgtacaaaaactttaattccttctttgataagtttgaaaatttgtttgaacacactcacaaaaagacttatcaatccttctatcaaggatgaaataaaacctttgacaaaatcccatgcgttgttaccccaaaaagataaagataaaacattttctaatacatagtgcttaattctgccaaatctagtactgaaagcttgtgatactgtttctgcatgaactccatctttcaaaccattataaaacacatctgtaatttcaaaatacaatggttttattacaaataatataatatttccgactatgtaatctttagactgatttgcagcttgctcagaaagaacactacccgtttgttttgctgccgcgatataaatgaatttagtagcatcttcctcctttgttatcatgttctttttcgcttctttggataatcccaaattaggacgtccttctttttcgcgcttttcttggtctttaacaagctccttatttgttgaatcaaatttccccccttttccagaagcgccagcacctcgatttattcttgctgatgtaagggcgtagtttgcattattattagctatgtttttaatatcgtcatcacttaaggtgtaaatacttttcaaatttttatggattttctctagtggaacaatgtgatctacttcggcttgatggtcgtgtttgtatttctcgatatttcttcgtccgtcaggatttgccctatattgatacacattccgttctcccgtatattcgtttacagcattaattcgtccaccattatctgaaaatttcttctctttatatatattcaatttctttttgtcttcatacactgatctgtcataagtctgagttggatgttttctagatttcttgaaatcatttatatttttccattcaacatatccattaggtttcatagcaactgccttcatctgacagtaggagaagtcctgacattctgcaatgattcttgaggctgttatccctttcttcctaagtttacgagttgcagagtttgcctctaaaaaaccatctataacagaagtgaatacaggtacaactagcttttctaccatatcaccttccgttttgaattctttatataaatcatcaattacagcttttgtttcttctttctcgtattgttcgatttcttgaagaacggaaacaaaatctaatggagaagcattttcaattttatgctccaattcttgttttcttaacttatccataaatgttatattgttttgatatttgattcactatcttcttcatctcctccctcacctcttccggttccatcacctccaccttctccctatgccacaacagcatctgataaaagttataactcggacgaagccagtagctgaacacactccagccatacccttgctccacttcctcttgtgaagaatgaataggtcgtgccctcacataatccacttgactgccatacacctttattttaataggtacaggagggcagtcttcatgattcacgccataacaaccttcaaaatagctttgcggattgatatatggtgagggggaaagttgttgttccgtcagccgcaagttgctgatgcgctccagtgcatagactgagggattcttgcgattcagcggctcggcaatgagataccagcgctgttcccatgtcttaagaaagcaaggaatacattcgtggtgctttactgcttgccggttgaaagagtgatagtcgaactcaaccactaccttgcggtcaatggcttcgagaatagcatgcagatgctccacaccgctgggcacatcttccaagaccaactctctgcgatgcttcatggccagttcggagagcccttgcacgtggaaagcggaaagcagatatttgtaaagcgagttgttctttatatagtcaaaattggagatgtaatacttccttgctcccgtatcatactctatgtcaatggcgaagacattggagacatactccttgtatcgtccgaatgttttgggtatgatttctccgtcatagagagaggaatactcccaatgatggttgatttccttgagcgacatcggtttgccacgcgacagaagctctatgatgtacaggcatttttcaagttttcccatagtgtttttctttattcggttacaaaataactctactcctcagacaaaaaacgtcttacctgtcacggtaaatttgcaaaaaaagcgtggcactgcaaaattacgtcttagctgaaggtcctaggaaaacccaatgaacaagatgtaagaatagcagcccacgctatagcgtgagaaccactatgctctctttgttcatttgaaaatttcctaggttttcaactataagacaagcataacgcttcttcaatttctaatatgtctcggagagagttgcttcaatccgaatacaaaaatagttattttgttgatgttttgcattatagagagcaaaaattataatttgaatcctctactttttcttggttcttctgctgattgtcgcagaccttgccgaagtttttcccattgctctttgaaccattcgcttattggttgcctgtttattgtaagcaccaatttattattatcaaccgaacttttctcaactttgaaaatatcatttttgatttcaaatcttcgtttatgctcttcggaatagatttttccattgcatctgatagcttctttctttgttagaagacaatctatcatatctttggtaaatccaatgactgtgcacaatttttccattctcaacatttctttgagtatcggaaaccagttgaatgccttttcaagcaaggtgttcagtcttgatatttccctgtctttggcttcaagttcttggttatgtattccttgaagattgcgtatttgtttgtcgtgctgttcctgtatttgttgcatcttggcttttagttcgtcaatacccttattgtgcttgacaacttcctgacgcaatttctcgttgacttgttccagttctttcaactttccacttccgaaaagagaaccaattccgcttgctatggcagtggcagcatcagtggctacgcttttgagtttgtccgtgtgtatttccgattttaccagtttgagctcctgttcggcaagacttacctgttgttccttgtgtcgcttggtttcatctatgcgttgcagttcggctttctgtttctcgatgatgaaatcatttcgttccaaatgttccttgcctgtctcggatttagattgcccacgttgcatggagagtatgtcagaagccaaagtttgcatttctatcatatcattgtcattgagcttttggctcttgcctgtgtcgtggttcatccagtcgaatacgatgtgtgcgtggtaattcggtttgaaccatttttcacctacttggaaactttctttgtcctctgcatcaggctgtccgttcagccaatgcccttcatctttgtgcaggaagatttgaagcggagtgatgccccaacgtctttggcattcctcgctaaatttcttcacgtctgccaatgtggtgtccggtttgatgagcaacacaccctcacggatgggcgagcatcctgccacttttatgatttttccgttcttccctttgcgttcacgctctttctcctgcatggcacgacctgtcttctcctttaccatccgtttgatgttgtcgtagtgcgtctgcaaattcggattgccgaagtccgggtttacccactgctcgttgtcggcagagagttcggacacaatgtagattttggattcaccgatattacgcatatactcggcagtccttcgattgtgagcctcacttgatttggtgttgcaaggtttgatatgtatgcttgattttattgccatactactattctgatttattgtttacgatagattactttgttcgctttcgcagaggggttcttaggggtacaacccataagcggagtttccaaagagaaggtcactctttggtctgggttctcagcggagaaacgccctgagtgggtcattagggcaaagccctaatcctctcgggagagcccacaactacgaaagcgaagcgtgtagttatagtgggctataaccgaaagccgtttttctttttcggtggttggctgggcgtctcttttacagattgggcttgcctgtttctttcagtctgtttctgtaagtattcgttcaagtccttgcatccgctgtaggtctgcgaagcatcacgaatgtataagtccctgccgtattccacacgtatttgttggagtgcttccatccctgcacggtcattgtcaaagaaacaatggatgcgctcgtagctccccaaaggatagagggctttggaaatattggctacggaattcaacaccatataatcttgcctgtccagttcgggatatttcgggcaattctccaatctcaaagtaaggaatgaaagatagtccataaatccctcgaacacataacacgtttccctcgctgttcccggctgtttgatatgggaaatctctttcggggcaatacagcctttaaaatagcggttgcggatttcatacccacccgacacgttgggaaaggcgatggcaaagtaccgtttgccgttgttggtgaagtgcgcttcactgcattctcttttcgccagtacaatgtttattcccctttcctgcaaataggtgagcagggcaggagaagaaagcggtacaatttccagttgttgaaaacttggctcggaagatgactgcttgccaaaagaaaaagacacgggatgaatacggggtgtctgctcttcgattctttgcaggagatatggcacatggtcagaacaataaagttcctgtgccagtgcgatgatattcccacccttgccgagtgcaaaatcataccattggttacgctctgtattcaccttgaacgaggctttcgtttcttcccttagcggtgacttgtaccacaggtttatgccctgttgtttgactggagaaaagcccagactgtgcagataatccgctattttgatttgtttcgctgtctgtatatccataaaatgataggtttaatgataattgaattggtttatttctcttttcgcccgtgccttttcatgaagtacggtctttataatcacttcactttattttcgtatatatagagtacggtaataaagtgaagcgatttatccatcccttgcaaccacttcgctttatccctaatatatagaccctcggaataaagtgaagcgattgcaaggtgtgggctaatagtggaagtcgggcatgaacgtgtacttcctgccgttctcctgtactatcatccgtttgttccggagcatggtgataagtgatactgctttttgatggttcagttttacacctaccgacatatatgccttgactaaggcggtttccagatccttgtagccgtattcctctttcagcccgaaagccgcttccagtgctatgcggtgctgttgttcggtaatatgcctgtaagggtcgaacttttcctcttccggtcttccgggtttcttcgcttcgggtctgtacccctctatgagttcaggcaatgcattgtcgttgatacggaaagcgaaaggttcgaaatccattgcacggatgtgcatggctgaaacattgcttatatccccgttgctcttgtccttttccaccagcagaacggtttccgccttgttgttcagctccgtaccgatatgacctcttgcgttttcatcgcctttgttctggtggagtatcgtatggatgtgtatctgcctgtcatccgtccactgcatcagtttggatataatgcgtgtcgattctcccggactgttgatgtcatataccatatcgcggatgccgtctatgattacaagccctatgtccggtgtattatagatagcctgttcgacaatcctgatacgctgttcgggcgtgtatttcctcaaagcgagaaattccagatgctcattgtccctgtcatcgggaagcccggccatccgtaaaatacgtttcatgactttcaggcaatgataagggctctgttccgtgtccacataaaggattttccgtttgtcttccggaagttcagccacatatcgtagcactgtaccgttcttcaatgcggcggctacgatagccgacacattgaaagtctttttgctcttggctttgccgatggatgcgctgaaattccccaatgtccctatgacggaaccatgtactttgagaatttccggtgctttctcgtaacttttcgacaggcttaaacgtgaggcttgccaaaggataacggcttcttctgccgatatttccttgttgtctttcatataatccataagtacacctcccgttattttcttcctccggttttctttccggccagttcaagggcaagttccgcatccacgataatcttgcgtcctatttgcgtaatggctttgtcaatctttccgcttttctttatacggttggcggtgggcagactgcacccgaacagtttggcaatgccaagtattccgtacacatactttctttctgtgtccgtgacgggctgcggttgcgcttccgtttggttggaagcgtgcttgcttaggaatatgaactcttcgcctgtcatctgccagacgggttttaataataactcttgaagatttgtcatcatccaatctatttagtcgtttaacaatcagccctgcgcactggctgttatttctgttctcgaacgatgcaaaattaggtatggttataagtggtaaggatgtggatgatataaatctgaagtcgttatatatcgctgaatatcaaataataaaaataccactcaaaaattaatttgagtggtaaaagtggtaattcgtggaatgtcaggatatatcacggattatctgaatatgctttccatttctttggcgaatttctggttgctgtcactcggaaaatcggaaacgggttctttgtacttcgacctgtaatagctctcgtcaatatccagtagtttcaatatcttgtctcgccattcatccctgtattgcttggatagtttttcgctcatcaggaatatcaggtaacacacccgtatcttttcccttgccttgatttttagtttgttcttgcaggggtacaggtttatattggcatagaagtccgctatggtaatggcttcgaactgttccccgacacatgttccatgaatgggcgaaagcggcttcatgtcaaaatattcatgctgttcctccggtgtattctgtacttcttcttgcgcattttgctcgacagattcctccggtcgtttctctttcacatcatcaggaaggtactttttcaagatttccataaaaagaatactcaggcggtaaacattatcggaaaggttttccgtatattgaaaagcctctttcctgtcttgcttttgcaattcatagagtttgtccaattccttcttttccttgtcgtattcagccttgcagcgttcatactccttctcggcttgcttctcttcctctgccgtatgttccctgtagccaatggaatcatatctgttatatgcttcattcaagggcttgcttaatttttgtgtaactctcaactgcgcttctatatcagtgtcatatctgccagcgaagttgtagcatacacgggaaattatctcatcatcaaacaatggatgtttttcgtaaatcagtatgttcttctctatctcggttctcaggctgttgagaatcagagtatattgttctttatgtttgtcaagcaccagttcaaggatagcggcttcaaaagctgttgtatcattgtattgcttatagaagtccgtgatgaatttctgcttgtcaaaagagaaagtatggctgattataaaatcgctgtatattcgattgagttcgccatattggggaatcataatctgtatttctactgccatgtacacttagtttatggattcttatctttatcaagaaaggaagtcagttcttcctctacttcttctatacttggcagaactgattttaaattctcaggtatagccttgctcaactgataatcgctgatacctatcggctggtcgtagcctgtcaaggcgtattgtgctacaacttcgtcttttcctttgcacagcaacaacccgatagtcttgttgtcattctctcccctcatcttgtcatccaccacattgatgtagaagttcagttgtcctgcatactccggtttgaatggggtagcctttaattccactacgatgtatgcgtgtaggggaatggaatatagaataaggtcggcaaagaaatcgctgttgcctatttgaaaatgcttttgtcgggcgacaaaggcaaaaccgttgcccatttccaacaaataacgggtaacgtgctttaccagttgctcctctatgtccctttcgtctgccttttctttcgctcctgccaaatcgaagatatacgggtctttcagtaggtaattggcaaggtcgctttgtggtgccggaagtgtggctgtgaaattgtttaccttgttgttgctgatttgtctgttatataggttggtttcaatttgtattttaagaacattgctgctccagcccatttctaccgattgcttcatgtaccaatattttacacctaatggaagcgaattattgagcatgattacatggcttgcccaatttattctggcaacaggggatgccaaaaataatttttctatatcctcaatcgttatccggtaaatggcagatacagttttggcaacattctgaatttgcgcaagaggttcttgcgtaaattctaacaactgactatcagtggattgtatttgcgcagtaagttcttgcgtaaattgtccgttgtttagtttcaagacttcatccgtgacattctgtatgcttggaacagatagccttgcatccgtatcaatgaaacttcgtagcacgttcagcggatatgaccgtgcgaattggcacatataagtaaggttacgttccgaatagcctttcttttcaggataattgaatcggatagcctttgccagttgcttgatgattttgcttccccagccttgtaagttctgatgatacaggatatagttgcccattttccagtaatggaatagcatttgcgcattggctgcggtaatcagccggacttgcgcttgttctatttccgaaccgacagcatgaacaaatgcgtcaaagttcgttctttctatatgatgttctttgttgttttccatgtttcaatgtttattgttgtcgcaaatataattcaaatagcggataatttatgaaactgattgatacttttatagttggttaaacttgttcatggcatttgccttaatatcatccgctatgtcaatataaggtttcatggctttatagtcgctatgccccgtccatttcattactacctgtgccggaataccgagagccagcgcattgcaaataaatgttcttcttcctgcatgggtgcttagcaatgcgtatttcggggtgacttcatctatacgttcattccctttataatatgtttcccgtacaggttcgttgatttcagccagttctcccaactctttcaagtaatcgttcatcttttggttactgatgacaggcaatgccatgtggttttcaaaatggatgtccttgtatttttcaagtatggctttgctgtggtcgttaagttcaattatcagactgtctgccgttttgactgtggtaacttcgatatggtcgggtttcacatcgcttcttttcaggttacgaacatctgaatatcgcagacttgtgaagcaacagaacagaaaaacgtccctgacacgttccagatattgtttgtcttttggtatctggtaatctttcagtctgttcaattcgtcccaagtcaggaatatcacctttttagaggtggttttcaatttgggtttgaaagtatcgtatgccatgttctgatgatgcccttttttgaagctccagcgcagaaaccatttgaggaatcccatctgtttgccgatggtgctgttcctcatatcctttttgtcacgcaggaaattcacatactcgttcaagccgaactcattgaagtattcaaaggttacatcttccttgaactctttgaggtggtttttcactgctgagaatttctcgtaggtggatgccgtccaattattctgattgccacactcctttacaaattcatcgaatacctcccaaaagcttatctgtgtttcttcctgctgctcttcgttggcatctttcatccgcaggttgaacgcatcctttagctgttgggtggttggcatggcttcctgtacctcaaattccttgaatacgttttgaatctcggcatagtatttcagcaagttcgcattgatttcggatgcgctttgctttagtttgttggtgcatccgttctttacccgttgtttgtcggcatcccatttggctacatcaatccgatagcctgttgtaaactcgatgcgttggcttgcatatatgacacgcatacggatgggtacgttctccacgattggcactccgttctttttccggctttccaatgcaaaaatgatgttacgtttgatattcataattgggtgcgtttgaaattttacacccaaatatacacccaatattcggaatagcaaaaggcatttagaaagatttagatttactctacatcttggatagtatgtgattatcagtgatttgcaattttatgatatttcttgaaagtataggttcaagagcctctctctccgctgaacgtgctggacagaaatggtcagcaaacggacaaaaagctacaaatcaatgatttgtggctttttttattgcccgaaagtcctgcttccaagacttcaaaagtacggtaaaagacaaagtttcgttactaaatcgttacctattccctgccggacaaaaacggtaacgatttgtccataaatgacctgataatgacttgattagtccatagtctgcataactcaaaaacgagaggtaaaaagtaattttgcaactaaaaaaagtgagttatgaaatcgacattcaaggttcttttttatttgaagaaaggttctgaaaagaaaaacggcgaggttatgattatggcacgcatcaccatagacggcaaactttgccagttcagtacgaaacagagcatccagcccgacaactggagcattgccgcaggcaaagccaaaggcagggatgccggaagaataaacgccctgctggacgacatacgttcttccctgaacaccatttaccacgaaatgcagcggcgtgacaactacgtgaccgccgagaaagtgaagaacgagttcttgggacacagcgagagccacgaaacaatcctttcattgttccaaaagcacaatgacgatgtgaagcagcttgtgggcatatccaagacgatagcgacctaccgcaagtatgaagtgacccgccgccacctcgctgaatttatccaaagcaagtacaacgtatcggacatatccataaaggagataagcccaatgttcattaccgattttgagttgtatttgcgtaccgcctgcaagtgcggttacaacaccaccgccaagttcatgcagttcttcaagcgcatcatcatcattgcccgcaacaacggcatactggtgggtgacccgttcgccagctacaaaatcaggctggaaaaagtggataggggctacttgacggaggacgagataaaaatcatccttaaaaagaaaatggtttccgaacggctggaacacgtcagagacttgttcgtcttttcctgtttctgcggtttggcttacagcgatgtcgccaacttgcggcaggagaatatccaaaagtcctttgacggtaacctttggataatcaccaagcggcaaaagacgaatacggacgtgaatgttcccctgctggatattcccaagatgattttgaagaagtacaagggcaagttgccggacggcaagatacttcccgtaatcagcaatcagaagctaaacgcctacttgaaagagattgccgatatatgcggtattaaaaagaacctgacattccaccttgcccggcacacgttcgccacgaccaccacgctgtcaaagggcgtacccattgaaacggtgtccaagatgctgggacacacaaacatagaaaccacgcaaatttacgcccgcatcaccaacagcaagataggcagcgatatgcaggggcttgacaagaagtttgtcggcatcgagaagatttacaaggaagtcgccatgtaatcttgattattgggaactggtcacaatttgtgaccagtccttactattattccaacattgctaaatctcctaaaatatacgattatggatttgcagattatccaaaacaagatttttgaggtcagaggttgccgggtgatgctcgattatcatttggcagaactctaccaagtggaaacacgagccttgaagcaggcggtcaagcgcaatatcgagcgttttccgggtgattttatgtttgtactcacccaagaggaagctaacttgctgttatccataggggtatcacaaaatgtgataccccctgcttacaacttcggcgttgctatgcctatggctttcaccgagcagggcgtagccatgctttcttcggttctccgctccaaagtagccatagaagtaaatatttcaatcatgcgggcttttgtcctcatgcgccaaatggcaatcggttacgaggaactgtcaaggcgcatcgaggaactggaggtaagcaccgatgcgcagttcaacgaactgtaccaagcccttacccagcttctaagccagtcgaaacaacagaaagaacgccgtccggtaggtttcgttacctataaccgtgacaaaaacgaataggtaacgatttcggtaacgaaattccgcctaacaaactatatcccaataaagtacattcttccaccttgcgggcagtccaccgactacccgcattttttatatccttttccaactggcacattccccgaaacgccagccgtgcgtggcatggctgactgtatttcgtgaaaagagccgttggaaacccgcacaagcgtattgcaagcaagctcacaacacccttgcctttcccgcccgcatggagtgttccctaaaagatgaaagagaacaggcacttttccccggtttccctatctgtaaatcttcctcttacgcagtcccccagccgggacagtcgttttaatcatttcaataggcaaaggtagttacgtgttcttcacgattttgcaaggtcgagccgttccggtttggcgaaaaaatcttccctgccttgcgaggtattttttgccccaaaccttgcaaactctaaacactacccttcccaagcctatgtgaaacgaaaacgaccgacccgaccggaagacgcataaaaaaaaagtcggatttacgggaaacaggaaaaaagttcagtgaaacttcaactccctcacctctcaaatccgcataaaattaaaaacttaaaaaattacagcaatatggaagcaaaggtattatcggaagcaaaagtttatgtaggcacttatgccaagtacaacaacggttcattgtccggcgcatggctcgacctttcggactattcggacaaggaagaattttatgaagcctgccgggagctgcacaaggacgaggaagatgcggaatacatgtttcaggactgggagaacgtgccggagggcttaatcggcgaaagctggatttctgaaaacttctttgccctgcgtgatgcggtggaggatttgagcgacaccgagcaggaagcctttttcgtgtggtgcaactataaaagccatgatttgggcgaggaagatgcggacgaccttgtacgggatttccgggatgaatatcaaggggaatatgacgatgaagaagatttcgcctatgaaattgtagaggaatgttacgacctgccggagttcgcaaagacctatttcgattacaaacagtttgcccgtgacctgttcatgtgcgattactggtttgatgacggctttgtgttccgtgcggcataacaaccaatccgggcggggtgtcaaagccctgcccgcttaaaacaaccaagtttataaccataaaaaaataagacatcatgcagtcacttaacaaaaacggggtaagcatcacccgaacaccgggagaagaaaagttcgtgaaatgccgtttgggggctttcaggggacaaatttattatcaatatgactaccgccacacggacggcgaacttttcagcacggtagccaaaacgctggacgagtgccgccgcaggcgtgacgaatgggtagcgaagaagaacggagtaataaacaagtaaatttcagggacatgaaaacgacagaagtaaacaaggagcttatcggcaggcgttgcgagtgtatttttacgggcttaatggtaacgggtgttatcgaggacacagaagaaaacgaacacaccatagaggtaaaagtccgtttcgaccacccgcaccagtggggcgatgatttgtataatgatgtgtgggcgtgggggcgcaaaatagacgagttcggcacgctgcaccatttgcaactgttggaggacaaaccggactttcagataatgacggtagttttcggcgagccaatcagccggatagaccgcagtgtttttgcagatgtggaaacgtggggcgtctgttccctgcaaggctgggtaaacagctatgaaagtgtccggtttgtagccatagacgaccatacggcaatcatcacgggcgaatataacatggagcaggtaaaggtgtggttagagaaatacacgtccataaagagccttaaaaccagttgatagaggacggcggctgcttgccgccgttactttcttccgtgagcctgccagcgggtgaagaaagtaacaaagaagcctttcgttttccctatcatggaaacagcccgccgatgcttcccggcgggctgtctgcccgatatttacgctttgcgtatcattccatacccggtttcccaagaggatgataaaaacggatgtcgcaactataaatcctcatagtgaataaattttacaccaagtatgcacacggtttcttcttcctcggtgtcatatttccatgtccgtttattgacaagcatttccgtgtcgcaatcgaaccataccattacgggcgcatcatcttcttcgtccgcccatttgaaaacctgattggacggcgttttccataattcagcactgtcacgttcggaaatacagtccttgtccacaatgatgatgtcacctactgccggaactgtatctgtttccaacgtggtttctatgtaccacgagataccttctatatccaattctatttttaccatgtcgttttattattagggggttattgtttccgttccttcttcgctgttgtcattattaaatgatagtgtaagttgctgcatctgcccgaagctgtcgatgatataaatgtcaatcgtctgctggtcggtcgatgccgaggtgtagtagagcctgaacgtttctttctccagcgggtaaaggtcattgggcaggaacaccgtgccgttatccatttccagcttccctttgccgtccggctggaaataccttatctgataggtagtcggctggtaatagccgccacgcaccagtcggcagcgtatttcggcggtttccccgactttcagccttttgggtactggcagtgtttcgatgctgaacgggtacgcctgctgaatatccaagttgtcattacaggcggtgacaagcacgagggcggccacgatgtagcagcccatgatgattttatacattacattcttcatatacattattatatagcggtcagttgataatgaatttcagtcccaaagatacctgcgtgtggaacttgccgatgtccgagccgaacaacgcccgttcccttgcgttcaacagcagagccacccggtcggtcaggtaggtttccagttccagcgtcagcgcaccgccgtaaatgaagcagtccttatccagcaaggtagagccgtccggcagcagcttttcgcttcggttgcttgtttcgtacccggcgagagccgacaagcccaatgaaaggaaaaaggtctttcgtctgtccgataggaatttcaggtaatagccgccctctgcggtgaactgttcgactggtattctcatatccttgtagtcatacttcttgtgcaggtattccccgccaatcacccagcggttggcgttcttggtgtaaacgctgtacgccgccccgatgtggtaggcaaaatccgcattggcgttccaatgcaccccgtccgtcatgcccgccgtgacctgcaagcctttcatgcccggcaggtatctttgtgcgtgtgcctgaaacgaggtcaggcacagcgcaaaaagcatcattataaagatgtgtttcttcattcctatttgattttgagttcgttaatcacttccgcgttcacgatgtcggcgttctccacccgtatggtctgatgccgcccgccgtttttctcgtagagttccaccaacagcagtttgtcgtcaggaatggtgaacttcggcagggcgtacaccgtgcggacggtgcttttcccggcaatctctactacctcgttgtaactgcgtaccgcatccagcaccgtttcctgaatagccgtgcgtttgggcactttcttatcgactatcttaaacttgatgaaatcggtatcgaaaggcacgttggaactgttcttcgtctgcgtgtgtacatagagcatcccgttataggtgtaaatccccttgattaagaactgtatgccgaaacgcttgctacccaagtggcgcactttccggtcattgttcttgtagatgctctgcattatcagcttcaccagtagcgggctttcattacccagttcccggaaatagatgttcatgcgagtatgcgagaaatcggacgtatcttcattttccaagaagtctttcatttcgatattgagcatttccggttcacgggcgtacttggcattgaatgaaaagaaactgccgtcctcgcagataacggagaagttcgtttcgcccggaaagccctctgtcgtggctttcacccggattacgttctccgcaccgtccgccttacccgctatgatgtggttgcttcccaaatccacgtagcggacggcggcggggaagatgatatgcaccgtcttggcaaaggtcacttccacgccgtagggcgttaccatttgtcggtaaggcagtttccgggtaatgccccggtacaagtcgttgccagccgcatacttcacggtgtcagtagtttgtgcgtttgccgcacacacgcccagtaagagggcgagcaatacaaaaatctgtttcattgtcaattaaaattttagtggatgaatatttgttgagtaattattgctgtttggcgtaaagcatcaccttgtacccggctttcagcttcactttcacggttcggaacttcttggcgaggtagccggacgttccttgcagcaatccccttgtcacgtccatagccacctgctgcccggcactttgggcaaaggaaatgcttgtacccagcccgcttccgatattcgccatagcttcgttgaacgcttcctgctccatagaggacggtacggaaagccccttttgcccgtccgtgtcgaacacggcgagttccaccgggatgatgttgccagcgtactcaatcgaggacaccagtatgtcgagccgttcgccctgcacctttgccgtccccgccacgagggtattcttcggtacaacgatatttcccgcctgcatgggttcgagcagccgtagtttcaccgcctgcccgtccaccagcgtttggtcttggtggatgcaggcggctaccgtgttctttcccatagcgtagcccgtgcctaccgccgtgttgaagccgtagtttcgtggctggctgtaagcccggatgaagtcggcatcgctcatgggctgctgcaatcccgaaacggtcgtttcccggatagcctgcaccgccaccgcatccggcttgcgttcaatgccgcccgttaccgggacttgtgcgacttgtccctgcccgccgttcatgtaccttgccgccagctcgtaggacttttccaagagagccatttggtcgtcagccgtaggcgtggcgttctgctgttgtttcagtcagtcggtcagttccgccacctgccgtttcaattcctctttttcctcgtccacagggggcgtttcgtagaacgtgcttaactggcggttgatgtcccggtaagccgcccgtgaagaagtaccgccgcccctttgtggcttcggatcttcttccggcatcagattgatttcctcttgtggttcttccgtatcatcgtccagcgtgaaaccgaagtcctgcaaggattgtatcttgtcctgctgtttgcggcttatcaccgcctgctcgtaagccttttgcttgtcggctataatcccgtcctctgcgggcaggggtatgtcggcattgaagccgcccacgctttccacattcacgtcctctttgccggagggtgcgaatatcaggtacatgcaccctgcaaaggcaaggaacatcagcgggaagactatcattttcctgcgctgctgcacctgctgcggggtaagttcccgtttgggcttgtcttcctttttcggcttcccgtccgcctgcggtacggtcgtgccgttctcattcttctgtacttcttccatattgcggtctgtttaacgggttgatatttttggttgtgtcattgccgtgcaacggcagttgcctgatgtgttctatttgcagcctttgcccgtcccgtttcccgatattgtatattgatgaaacggtgatgtagatagacaagccgccgaaaaagaagaacatcacgaggataaccgccagccttttgcccggcgtaatccgtccgcacatccggcgcaggcggtcgtccgcccagtcctgcaccttttcgatgtaatttcgttttctctccataaggctatcttttaatggtctgcaaatccttgttctcggtaatggtgaacgcttcgatgatgaagccgtgcgggttgttgtcgctccgtgtggcgttaagcaaccggcacgaggtcacaaggcttcgcaccgtcaggctgctttcccggacaatcaactggcgggcatacgtgttcaccttgtaggggtactggtcgaagtcgcacttcacgctgtcaatctccaccgtctgcgtgacgtttccggaaatcacccggttgtagtagcccttttccgccaagtccttgtaatagttgaaagcggtcttgtcggcgagaaacaacgaacgtttgatgttgctttcgatagcccccttttcgggtgataaggtgaagaaaagttcgtggaaacgccgcacgtgcgacttcgcttccacgggtctgttttgtgccatgtcctgcgagagtgccagcatcaggcttttgccgttgtcgaggacgtatatcttctgccgctgcttctcggcgaagctgtacgagttccacacggcaaagcccgtcaccagtgcgcacaggcagatgaataccagcgcaaagagccggatttgccggaaactcgtttcgatgttcgttaatgacttaaattccatatactaaattttgatgttggttatttgagtagtttcccggttactttcccgcttgccgcaccgaccgcagccccggcgattgaaccggcccgtgccacgttgcggttataggcagacgtaccgccagccgacactatccagcttgccaccgttggaatggtgaagtagcccacgatgccgataatcataaagattatatacacggtgctgctcccgtccgggatgaaattcgggtctgaaagctgctcgatgtctttttggagcatcagggtttgtatgcgtgccagcacgctgctgaacaagtccgacacgggcagccacaggtaaatggagatatagcgtgaaatccaccgggtcagcgtgctttggaaaccgtcatagacggaaatcgcaaacgccagcggacccagtatgcttaacacgattaggaagaacgtgcgcagcgtgtctataatcagccccgccgcctgaaagagcatttccaataactccctgaaccagtcccggacggacttctttatattataagccgtcctgtccatgtacatacccgtcatagtcaccatgtcggagggtgaccagcccagttcttccagttgtcggtcaaattcctcgtccgatgcaaggtaagccgtttcggggcttcgcatcagggcttcatattccagtcggtctttctgcgcccggtactcgttcatgtcgaaagtctgcgtttccataagctggttgcacccttttaccactggcgacaataccgtgttgatagtccccagcacgaaagttggaaaaaacatgatgcacagccccaacgcaaagggacgcaggagcgggtacacgtctatgggttcggcacgtgcgagcgactgccacactttggcggctacatagaacaaagctcccagcccggctatccctttggctacccctgtcatgttactgcacaagggcatcatttcatcgtacagcacccgcaacacttggtgcaggttgtcaaaatccaccgctgctaataacataggcataccatatttatacgttaccagtagcgttcatccgccgagccgtagagagccagcacccggtcggtgtcgttcttcttcttcgcccgcaggtaggacacggatatgttctttcgggtgtagtagttcacgaggttgcggtagttgagcaggcttttataggcgttgttgattaccgccagcctttcggcatccgtcagcgacatgcccgtcacgttcactacattcttcaagtcctgcaacacgtccgcactttcggagagcagcttggcgtacccggctgaaatggcggtgagttcatccggcgtgtagttcgggtctgccagcatgttctgatagtttcgcacgtagatttcggatatttccgccaccagctcaatggacttcttcaccttgatgccgcccttgacaacatcgtgtaccgctttgagcgcatcgtaatattttttaccctgctggaaaatcttctgcgcttccatgaagccgtccagcgtgttcttggcagtggtggaagtctgcactatctgcttggtggtgttgatgatgccctgtgccaagttgccggggtctgacaccacccactgtgcggatgccttgccgatgaagcaaaggcataccgccaaaaggagaattgttttcttcatgttcctaatttttaagttgttgatgattggggattgcgtttgctttccgcaagccgcttgatagccagttcaaggttgccgcccagcttgtcggcgagggcgaacagttccattttctcgctttcctctgtcgtgaacgtgtaatattcttccaatgaaacttcggtagcgtacaccgccgattgtgtgccgcccagcgagaagaaaacttccttgtacttccgtccggggtggttcgccatgttgatagacaatatctgcgaacgctccttatcggtcagccccagcaggttttgtatgctgtcgaacttgttgagatatttcctttggtctaacaatattttgcagtccgagttgttgatgatactctctttcacgataggggaagaaataatatcctcaatctcttgtgtgaccacaatcgcttccccgaaatacttccggactgttttgtgtaggctaagcacccggcgccttaccgtatttctacggcaggtttccaagaactcgcccccgaaccggacttacacctctcggcgtatccggctctccactaattttttttcagtctaaacttttcccagatgccgcagcctgtggcaactcggacacaacgcaatggtcttgcgttttcgggctgacatgagccgtttccaactctctttccctttcaggtctttgaggttgcggacatggtgcataatcagcttgcccgttgccccacacaattcgcatttttccgctttgagcctgtccgtcaaattggttcggctcacgtctgcaatagagtacggttcgatgtcgcagcttccgttgaacgccgttgtccggcgtttgaaacttgtcttgtaaaaggttcgggacttgattacccctttctgctcgtactttacggtgaacagtttgttgagacggtactttttgttgatttttcgtaccgtgctcctatatttgcccgcaaatgttttatacatgctgtactccatgatatatctgaagttgtgcagtacgacgcagttgttggcgatcaggtaatagttgcaaaatcccactgtttcccgattgtatcggtcgaggatttcaagatcgtcgttgaatatcaatcctgaacggcatttgggtttccaaatctctttcccgttgcggagcttgatttccatagctccgtattccagaagtttgtcccgcagcgttgccatgctgacattcagccggacacgcttgccgtaggtgcgtcgcagacgtccttgcacatcccgtcgttgatgattgttccgtgttaccgtaatctcatatccgagaaatttcgccgatttacccgtatgggttatcagcgtcttttcttcggacagttcgagggcgaggctttcggataggaatgatttaatatcctcctttatccgcagtgcatcctctttgctaccgattacacccagaataaaatcgtcggcgtaacggatgtatttgagcctgcggtaacttccgtccatttcatctccgcttggaaatgctgcacgttcctgttcgatggctttgagtcttgcgaccaaagccgccttctcagtcccgtcttttatctttttcagtttccgcacagtccgttttcgttcattggccaaatcgttgctctctttgcccggcctgcgtttggttcccatgtcgaaatgtcggatatactctttcacgtacttgtctaatttatcgaggtatatattcgccagaatcgggctgacgatacctccctgcggcattccgctgtaagtgttgtgaaacgtccaatcctcgacgtatcccgctttcaggaatttccgtatcagacggataaaacggtcatctgaaatgcgctcccgcaggattccgacaagtacatcatggtcaatgttgtcgaagaaccctttgatgtcgccctcgataaaccatttcgccccgctgaacgtcttttgaatatgaagtaatgcagtgtgacagctccgtttaggtcggaaaccgtgcgaggtggtctcaaaatgtccctcgtaaatggcttccagaatcatgcggactacctcctgcaccagcttgtcttcaaaagccggtattcccagagggcgcgttttcccgtttttcttcgggatatgcaccctccgcgacgggtgaggctgataactttcgtctttcaacgaggctatcagcgtttcgatccgggcaaggctcatctcgtcgatactgcgaccgtcggagcctttggtcgtactgcctccgttcgatgcgatcttttggtaggcaacatagaacaactcttcgttgaacagaatccggtaaaggcgttcgaacttgtagctcgaatccttactgtgttcgttcagactgtttaatactctttccggacttctcataatgtctctcacattatccattaaattgtattaaagaaaattagctgcctcccttcgccatgtgcagggcgttaccctgcccggactactacggaggctccgttaccgtgccggatattcagaggtctgcacctcatagccttacggcgttccggtttaggtaatccccgtttacttacttagtaactgttggcatgatggattgtcggatgcgatttccgtcctttaccatttatcatggttgctctgcggcaagttcttgcttgcgtccgtacctatacaccggagcagtaccgcagtatgacgatttcagttaccttacgtcatagccttcaagtagagcagctcggactgtcgttcaaacaattcggttttcatcctcatatccatcgtttcatcttgccgttcagtggcagtctggtaactgactgacttacgacgttcccgacatgctacactccccgtccggtttccctttcggataagtcgggtgatgataggtttttcaaagaacacttacctaatcccttgccagtgggatatttactaagcagcttgtacgggcgcacagaggtagcgaatataatccgccatgttcgccgatgcaatcgctttccacgcttcctcgattagtattaacttccttattccctttaacttgcgcatcttgtttataaaggcttccatgatgatgatagtcgttaccgggaataaaatcttgtggtctttgatgttatccaactcaaagacaatgaagcgtttatgcagcaaatccagttccttgtcggagttcagcaggtagtcgtactcaccgccacgatagtacggttcaagcacgttcaggaaattgtcaatgtcaaaatccttttccctgacgtttttctgttcaagctgtcggcggtaatcatccctgacaaactcgtagaacgtgttgaagcagggcgttaccgaacggtctttgcctatcagttcgatataggcactcacggcgtttgacaacgccacttcttccgaccgtttcggggcttcatcgtcccgcttccacagggtgagtatcagggtcttgatgctctctttcttctcgatgtcaaataccccgtcctcgacatagaacgggttgaaggctatcgggttctcgttggtgtaggtgaaataaatcccgtcctctccgtgtgtacggttgtggataagctgggacagccccaagtagctgttacccgtatcgaccagcagcacgtgcgccccctgctcgtaatactggcgcaccatgtggttggtgaagaaagacttacccgacccgctcggcccaagtatgaacttgttgcgattggtcgtgatgcctttcttcatgggcaggtctgaaatgtcgatgtgcagcggtcgcccgcttaccctgtccaccattttgatgccgaacggcgaaagcgaactcttgtagttcgtttcttccacgaacaggcatagagcctgccccaagaacgtgtagaaactttcctctgccgggaagtcggcttcgttgccgggtatgcccgcccaaaagagcgtgggcgtatcgaccgtgttgtggcgtggcttgcactccattaaggcaagctggcttcccacatcgttgcgtatgcgtttgagttcgtccctatcgtcactccatgccatgacgttgcagtggcagcgtaccgaaataagccccttgctgtgcgcttcgttcaggtactcgtctatccattccttgttcacttggttggcacgggagtaacgggagagcgattgcatgttccgggcggtctgctcgaagttcttcaggttttcggcgtggtcgtctatgaagatgaactggttatagacgtggttacacgacaacagcacgcccaccggggcggcaaaacttaacctgcaatcgcttctgtctgtggacagcttctcaaatcggcagtccgtcccgacctttccgggcaaatcttccacgtccgaaagcgtgtgcaggcacagtatatcgtccccgacacgcatttcttccgggtacagcccgatgtctttcaggcaggtggtatctgtctgcgatagcgagaagtatttctcgatgatgcccgcctttccgtcctgcccggtgatttccgatgccgccagccgggtaagggtgacaaaaccgctgtcgttcataatcctttcaaactgcccgaccgcttcgatgaactttgccgccgcttccttgtcggctatctcctgcggtacaatcctgccccggcatagggtggagaagtcgctctgtcggcggcttctctcccttgtcgtctttgtcaggaacaggtagcagtaatggttcaggaacgggcgttcattgaagtgccgttcaaaggatcggcttaaaaaactaagctcgtccctttcggtgtcgggctggtagttctccttgatgaagaagtcctgcttgtgtactatggagtagtcgggcagcaccttgaccgccttgtaccacgccgaatgtatggtttcgtactcggcactggtgacggtgaacagttcgggcagttccaccctgaaagccaccgtgatgtctgcatcctttgatatgatgcagccgttctccaccgccaaaaggggaaatttcctttccagcgtggtagcctttaacatattcctcatagtctttcttcctttctttttttgtaggtgaataatcggggtatcgcctttcggctgataatgaagcgtggatgccgtttgcgtgcggcggctttcatcagcccgtgcgtgccgtaccgtgcgttgagccggaacgtctgccacacgagcagcagcgaagctgacacgatgaaaccgatacatatccactggttcacgcctgccatgaacaggacgatgaacaccacgaagacggcgagcaagccgccgcaaaagataaagaggtactggcttttcagccccttgaactccaccggctttccgatacccctgtttaccggatatttttcgggcttagccctcaacaactcgtcagacatagccgcctttttagaggaagaacgaacgcaggatagtggcggcgacaatcaggaagatgcacgccccgaaccaactggcggcggtctttgaggtgtcggggtcgccgcttgaaaacttgttatatacttttaccccgccaatcaagccgcagaccgccccgattgcgtacaccagttttgttccggggtcaaaatacccggtgattaggttcgtggcttcggtgatgcccgcctgcccgtttccttgtgcgtaggcacttaccacggcggcaagtatagccgccgacaagaagattttctttctcattgtgatttgtttttaatgccgggcggcgggtggatagtccgcctttcccggctggtgaataatttgaaattttagtggtcggggatagtcccgtttgtctgtttggttttcaggttgccaatcaaccgtaatcccgttgtttcatgctgtcaggcttatacattattatattataggaaatcgttcatgtcgaacgcttcgtgttcctcgcttgtattgccagttccggcagggacagcagccgtagccagttccgcttcgttgcgtcccagcagttccgccacctttgccagcccgccgttgatgttctccaccaccgcatcgtagaggttcgtcccctcaatgcttgccagtgtcccggtggcttgccgtttctccgcttcggtggggttgtcggcgttcgccgtgcgtaccgcttcgcccagttcgtcaaagctcacgcccgtagcccgcccggtatcatcgtcaccgtccatgtacccggctatttcctcgtcctcgtagtcgggttcgtcattctcgtaaccgggcgtttcttccgcttcggctgctgcttccggaatgttttcttccggctgtccgtcagcctgcggcgcaaaaatagtatcattttcagccgcttgctggaggtgtcccgatttgtcctgcgctgtcccgattagtccgcccttgtatcggctttcacctatcagcgtgtagcccgaaacctcgtttcgtgggagtggcgcatcatccgttctgcccggtgatgtccggctgtccgtgtagcgataccacagccacagggcgatatagtacaccaaaagcccggtaagtatgcaatagattatcatagtcagacaggcttttggaagtggctttcgtacagggtgtttatctcgtcttggtactgctcgaagtgccgcagcagaatgttttccacgtagctgcttaccgtcaccttgcgcccgcctatcactgttacgatacgcatcagcttttcgtgcgtggtacggctcacgtacaagggctgtcggtctgccagttctactttctgaaagtaggtttcccggtagtcgcccgaaccgcccttgcgcttgcggtttgtcgttttctccacccgcaccgtttccgtctgctgttcctcttgggtaacttgtgatgcaagattggtatgtggtgcatcattcggtttattatcttctttactgggaacaccctgcgatataagctctttcatgaaatcctcgtctatcttcggcatcccgccgctttgttttgccatatcattttaatttgatgtagtacactatttcggttatcagttcttccaagttgcttccccttaccagcgggcggctggcgggaaagagcgtggagcggaacaccgcctttttatccgctaccagttcctttttgtagcgtttggtatcggggataaaggttttcatcagcggcagttccagttccttaatggtcttgtcataggcggtgtaaaggtctgttttctcccgtccgtccaccatgttccaaaagagatacagcccggcaagtcggcaggcttcattcctcaccaatagcttttggatagccattgcgaaagacaggctgctttccagcaccaccttgtcggctgaaatgggggtgaaaatgtagtccatgcccgcaagggagtttatcacgccctcgctgttcaccgtgccgggcaggtcgaaaaacactatatccggcacgtgtccggcggctatatatccgtcagccgttgcaatcgccttttcaggtgaactgcacaataccgggtaggctttctttcccagccgggtgaactgttcatacgccatgcgcttgtaatcttcatccgccccgacctgctcggcatcccgctttcgcatcccggcaatggaatgttgcgggtagtcgcaatcgaccaccgccacatcgtagcctttgaggtagtagaggtaactcgccgccagcacggtaaaggtggttttgccgaccccgcccttttgggtggaaaaggcgacataaaggggcgttttctcgttttccatattgcttccgttcattattggttgatagatttatttattgcttccaatcattcattctttccatgttgcaatcttgaaatattgaaagaatgttttatttcaatcttgttttcctgctttcattctttcttgaaatattgaaatcctgcaatcacgttttattgcaatcatgctttcaatcattctttcctgattggaatatttctttcaatcttgaaatccgatgcaaaaaaaaggagaaaaaacgtcccctgaaaaccttgtcccgatttgtcctgcgctgtcccgctttgtccaccaaccgcctattttacagcattataaatcaccgttactttgcagcggagtaacgaaccgcaggggggagcaggtgtaaaaccgggctggtgaatggcagggcttaccgttccacgctaaccccaatccgtccatgacggatttcgattttcgtcagaaaatagcaaggtgtgttttgtatgctacaaaaccgttttccgtgcctgaaaacgccttgccccttgcgggggtaaaaatcactccgaagtcgtaatttttttaatccaaagaagcatggaaacaagaaaacctaacaagggcggtcgccccgccctcgcagacccggcgaagcatcgccatgtcctttacctgaacgaccgggagaacgcccgcttcctctcgcagtgggagcagtcgggcgtcacgagcaagtcccgtttcatcgccgcccggttgttcggcgagccgttccgggtggtgaaagtggacaaatcggcagtagaatattgcgcccggctgaccgaattttatgcacaattcagagccgtggcggtcaattacaaccaagttgtaaaggcgttgcacagcaacttttcggagaaaaaggcactggcttttctctataaactggagagagcgaccactgaattatctatgttaaaccgtcaggttatcgacctgacaaacaagtgcaaggaactatggttgccaaaataagcacgggcggcaatatgttcggcgcactggcgtacaaccaaaacaaggtggacagcggggaagcaaaggtgcttttctccaacaaaatgctgttgggcgaggacgggaatttctctatcggcgggtgtatgcgcagctttgaaatgcagatgcccgtccagctatccaccaagaagccgatacttcatatttccataaacccgcacccggaagacgtgctgaccgaccagcagctttccgacattgccaaagagtatatgcggaagttgggctatggcgaccagccctatttggtgtacaagcataccgacatcgaccgccaccacatccacatcgtggggttgcgggtggacgagaacggcaagccgctgaatgacaggttcgagcatcggcgcagcaagcaaatcacccgtgaactggaaaagaaatacgggctgcacccagcagagcgaaaggagcgtgccgaacgcccggaacttaaaaaggtggactatgccgccggggacgtgaagcaccaaatcggcaataccgtgaaagcggcttgctatggctatcgttttcagtcgttcggggagtacaaggctttgcttgccgcttacaacgtgtgcgccgaggaagtcaaaggcgagataaacggcaagccctatcagggcattgtctattccgccatgaacgacaagggcgaaaagacaggcaacccggtaaaggcttcccgcatcggcaagtcggtgggttatgaagcggtgcggcgcagaatggagaaatcgggcgaagcaatcaggaacaagaaactgaaagagcgcacccggaagattgtagccactgccatgcagaccgcccgcagccgcaaggaactggaacaacagctaaagaagcagggcattgacgtggtattccgtcagaatgacagcgggcgcatctacggcgttacgttcatcgaccacgacagccgggtggtgctgaacggttcacgcttgggcaaggagtattcggcgaacgtgttcaacgaacgtttttcgggtgaaaccggaaatatacaccagtcagaagtgaaaacacaacagcgggaacaatccacgcatcaggaacagccgggcttcacgccggaagccgacatcgtttcgggcgtggcttccgtgctgggtgctttcggcggtttgctgggcggcggtgcatcagtcggtgacgagccgcaggacaccgcccgccaaaagagaaagaagaaaaagaagcgcacaaggcgcatcgactaacttaaaaaacattacaatcatgcaacaggaagatgatttgagagggcttgcaagggtcatggactttatgcgggctgtcagtattctattcgtgggaataaacgtgtactggttctgttactccaccctgaaagagtggggagtgacgtttgaagtgatagacaagatactgtggaacttccagcgcaccaccgggctgttctcgtccgttctttggacaaaactattttcggtggtgttcctcgccctgtcgtgtatcggcactaagggcgtgaaagaggaaaagataacgtgggcgaagatacattgcagccttgcggcgggtgtcgtgttgtttttcctgaactggtggttgctggaacttccgctgccacacacggcggatgccgtgttttatatcgccacgctgtcggtgggctatatctgtatgctcatggcgggtacatggatgtcccggctgttgaagaacaacctaatggatgatgtctttaatacagagaacgagagtttcatgcaggaaacaaggcttatcgagaacgagtattcggtaaatctgcctacccggttctactataagaagaaatggaataatggctggataaatgtcgtgaacccgttccgtgccagccttgtgttggggacaccgggcagcggtaagtcgtatgccgtggtaaacagctacataaaacagcaaatcgagaaaggttttgcgctttactgctatgattataagtttcccgatttatcggaaatcgcttataatcatttgcttaaccacttggacgggtataaggtaaagcctaaattctacattatcaattttgacgacccacgcaagagccaccgatgcaacccgataaacgccagcttcatgtcggacattgcggatgcctacgaagccagctacacgattatgcttaacctcaatcgaagttggataagcaagcagggcgatttcttcgtggaaagtccgattattcttttggcagccattatttggtacttgcgcatttatcagggcggcaggtattgcacgttcccccatgccattgaactattgaacaagaaatacgccgatgtattcactattttgcgcagttatcccgaactggaaaactacctttccccgttcgtggatgcttgggaatcagacgctcaagagcagttgcagggtcaaatagcaagtgcgaaaatcccgctttcaaggatgatttcacccgctctttactgggtaatgacaggtgatgatttctcgctggacatcaacaacccgaaagagcctaaaatcttggttgtcggcaacaatcccgaccgtcagaacatctattcggcggcactgggattatataacagtagaatagtgaagctgataaacaagaaaggtcagcttaaaagttcggtgataatagatgaattaccgactatatattttcgtgggcttgataatttgattgccaccgcccgaagcaacaaggttgcggttctgctgggctttcaagattacagccagcttacccgtgattacggggacaaggaaagccgtgtgatacaaaatacggtgggtaacgtgttcagcggtcaggtagtcggtgaaacggcaaaaatcctttcagaacgcttcggaaaggtgttgcagaaaaggcagagcatgacaatcaaccaacgggagaaatccacctcgataagcacccaaatggacagcctgatacccgccagtaaaatatccaacctcacgcaaggtatgttcgtgggtgcggtggcggacaacttcgatgaacggatagagcagaagattttccactgtgaaatcgtggtggataatgaaaaggtgaagcgggaaaccgcccgttacgtgaagttgccgcagattatcgacttcaccgacaaggacggcaacgaccggatgcaggaggagatacaagccaactatgaccgcatccggcaggaagtccggcagatagtcgaggacgaaataacccggattaagaacgacccggagctatgccacttgattaaggaggaagaatagctgtatataataatgtatggagtgaagaacagccgatgtagctttacggttgttcttcattttgctttttggtgcggtaggcttcaaaacgcactaatatttcgtgcaggttcttcaatgcttccacagctttgcctatcggcggcatcttgcttttgtcgaaagtcagtttcttcaaatcggtagtgtacgccgtagccacttcgggcaacgccatgaccgcttcggcatccttgaatatcggtgcatcagccagcgacaagtgcgaacgggagtttttatttagtccgtcctctatcgtcacccggtacatggcatccaagaaatcttccgaatgtaggtaatcgttatattcctgattgtggtagagtgccgacaagtcgtaaacgtcacggatatgctttgccaacagtgcggctgcatcctcattgtaagacagctttaccagccttgaaaccttgtcgcatatagtctttcgggggttgatacattgcgtttcaaaacttcccagcccgtaggtgcttatcagttcctcttgcccgatgctttcaagaaaggcggtcacaatcggtttgataacccgcttgtccgccgggtagaacatcagttttttgtccggcaggtcacaggattttatctctacttccaaatgctctttaagtcccacgccttgaaatacattgtcatacgagaaatacagtttacggtaattaccgcccgtttccgacaaatcttccttgtatatgtcactgttgagttcggctatgtatttggaaagtttcttgttcaatgtcttttccgcctgcttggacgcacctttatcacccgtgaacacgaacaagtccaaatcttccgagaaacgttctatcagcccgtaggctttggaaagtgaagttccgcctttgaagtaggtcttatccgcatattcggacatggaaatatcccgcagtatcttcgatacccagtaatccttttccacgtgcgactgctcgtagctgaaatgttcagccgccagtgcgatgatttccttgaacgcttccttgtccgaatgtaaattcatatttctgtcctatgccgttttataatccaagttgaaccgtgtcgtgggaagaatggtctttgccatttctgtttgcaatacggtttgtctgatgtcgcccaatatgtccgccaccacctttctgacacgtggcgggtaacttttcgccaaagatacgattttttccagttccggcaggctgtacccgttaaaatattggcttttgacccggttgtagatgtcctgcccggttgttccgggtatgcgcttcatgtcctttatcgcatcgagcagccgcaagtacgggacaaggctttcatccgggtagtccatgcagtaggctttcacgcactctatatccaagttcttgaaacggaaacggcgaaccgggttaggagtggctatcgttatggttgtggcaacctgttcggtcagccccattttgttatagatgtaagcccccgtgatatagccgttcagtttttcagtcaggtagcggaactgttcatcctgatagacaggcagctttcccagccccagcactgatttcttgggacggtagtacgcccccttttcaacccgtaccagtacccctttgcggctctgttcggaaagtagcaccgcaacattggcagtcttttccatttcaaacgacaaatcccggaacgtgaatatacgcccggtatctatccgttcaatctgcccaagtatctctttcctgaatgaagccatatttatgtcctttgtttctatctgcaaagatagtatattatgtaatcacctgcaaaaacataacaaagattttgccgaagatgttttctttttgtcgtgtcacctgataataggagaataacggaaactcaatcaaaggcttgccaaacgcttcacaaacgttccaaaaataagctgtatttcagtattaattttgatatgtagctcattattagtctattgataaaatagcaaacgttccataaacgtttcacaaacgcttcacaaacgcttcacaaatggctcgcaagcataatgtaaattttaataagttgttgattataaggcataaggtttatgattaaatggctcataaatggctcaccccaagagagtgattaacttcgctctcttttttatgcctgtttccaattctccaaccgtcagttggagatttactccacccggacaatttcagacaacgcaggacaaatttggacagtccttgccgcccgtccaaatatagcatatttagtcgctacctttgggcgggactattcccgtaaccactaaaattccaattatttatggcaaacagaatgaccccgcccgcagaggggcaggaaaaagacgtgctgctggtcttggataaacagcagggaaaggtgagtgccgttaagggtatcgacaaggacggcaatttgcagaccgtgccacccactaccggacacggcggcgagttcatgcaggtggacaagaacagcgatgtgttcagcaacttcatttccaacttctaccgcaagtatcaggacacttccgggctggaactgttcagcgtcaaggcttccgaagcggagcgggacgcaaaggcaatcgaggacaaccaccgcaaccctacaccggagggtgacaagcgggctgaaatgcttcgagttccgaagcccgacttccacgagttcaagcagggctaccgcttcgacccggcaaaaatcgactgggagaacctgaaaaaagtcggcatcaccgccgacaccctgaaaaacacgagggacttcgaccgggtgatgcgtggctacaagtctcgcaacacttacactgtttcggggacggtgggcggcttctacctcaaacctaccgatgtcaagctctctttctatcaggcaaaggacggcacggtagtacccaagctacacggcgtgcagcaggacgaaaaactgttgcaacgcccgttccatgaacacgagttcaccaagcaggaacaggacaacttgcaaggcactggcaacttgggcggcatcgctgaaatcaaagacccgaaaagcggcgagcaaatccccgtgttcgtcagccgggacaggtacacgcacgagctggagtatatgcgggctgacaagtggaaatgccccgatacaatctgtaacgtacaagtcagcccggaacagaaagccgcctttgaagccgggcaagcggtgaaaatggaaaacctgcaattcagggacggcacgaagcgcagtgcctatttgcaggtcagtgcggtggagcgtggcttggagttcctgccgaggtctgccgtccagttcttgcagcagggacagcagcccggagagcagcaggtagccgggttaaaggacggcaagggcgttgagttcaacggtcatgtacagtccggcgcacagggcaaatcccccgacaaggtgcagccgaaagacgttacccccgccgccgagagccggacgcaggtagcggtcaattccgggggcaagaccaacgaagccaccaagcagggcaaagagccgttgaaacagggtcaggacaagcccaccgccaagcagaaagagaagcaggagaaagcgcaggacaagagcctgaaagctgacaagcccaagaagtccagaggaatgaaaatgtaatatccaccattaaaaagtaaagaattatgattgcattgatagcagaaaagcccagcgtggcaaaggacatcgcccgcatcatcggtgcgaccgggcgtaatgacggttatctttccggcaacgggtatatggtgacatgggcgttcggccacttaatccagcttgccatgccggaagcttacggcgtggcgaacttccgccgggagagcctgcccatactgccgcccgatttccagctaatcccccgtcaggtgaaagcggagaaagggtacaaggcagaccccggcgtgctgaaacagttgaaagtgataaaggaagtgttcgaccagtgcgaccggattattgtcgccaccgatgccggacgtgagggtgagttaatcttccgctatatcttccattacctgaactgccggaaaccatttgtgcgcctgtggataagcagccttaccgacaaggcaatccgtgaggggctggataacttgcagccgggagagcgttacgataacctctacctctctgccaagtcccgcagcgaagcggactggctgatagggataaacgccacccaagcgttgagcgtggcagccgggcagggggtgttctcgctgggcagggtacagacacccacgctcgtgatgatatgcagccgctatttggagaacaagaatttcgtacccgccaagttttggcaactcaaagccgataccgccagcgggggaataaattttaccgcccaatcgaccgccaagtgggaacggcagcccgaagccatagccgccctgcaacgggtaaaggatgccgggcaacttgtggttaaatccgttgagaggaaagaagcctgccaagaaccgccgcttttgtacgaccttaccacgctgcaaaaggaagcgaacacgaagctgaacttctcggctgacaagacgctttccatagcgcaaagcctgtatgaaaagaaagtgatgtcctacccgagaaccggaagccgctatattccggaggacgttttcgatgaaatgccggaacgtgtcgccctgctggggcaatactcccgctttgccgggtatgccgccgggctggacggcacacccctgaaccgccgcagcgtgaatgacggcaaagtgaccgaccaccacgccttaatcattaccgagaacctgcccggcgaactttccaaagacgagcgggcggtttacgagctggtagccgggcgtatgctggaagccttttcgggcaagtgcgtgaaagacgttaccaccgccttgctgtcagggggagataccgacttcacggtgaaagggtctgtgatgaaagaagccgggtggcgtgccgtgttcggcgagcaggaaacgggcggggatgaagaagccgccagcctgccgccactccaagagggagaatgtttgccactctccggcgtggatctgctcgaaaagcagaccaagccgaaaccgctgcacacggaaagcagcctgttgtcggcaatggagaacgcaggcagggaactggaagatgccgaactgaaagccagcctgaaagatgccgggataggcacgcccgccacccgtgcggcgattatcgaaacgctgttcgcccgtcagtacatcgtgcgtgagaagaagaaccttgtgcctaccgacaaggggcttgccgtttatgggattgtcagggacaagaagattgccgatgtcgaaatgacgggcatgtgggaaaccgcccttgccaagatagaagcgggcagcatggatgccgacacgttccggaagggcatcgaggtgtacgcaacgcaaatcaccgcagaactgctatcggtgcagctatctgtcgctactggtgaaacctgcccctgcccgaaatgcggcagcgggcgcatcctgttctacccgaaagtggcgaagtgttccaacgtggactgcacgcttaccatattccgcaacaagtgcgacaagcagctttccgacaagcagattgtcgagctggcgacaaaacgcaagaccgggctaatcaaggggttcaagggcaagaacggcaaggctttcgatgcttcgctggtactggacgagcagttcaatgtcggtttttcattccccgaaaagaaagcgaaaccgaagaaatagcctatctttgccgctgaaatttcattgtgataggttttacagcttataataattgaaattttagtggttgcgcccggagggaaaccgggcgcattttttatatgttcccgccaaacaggtaggtcgaacagaccaccccgttatccagcaccctgctttccgagagcttccacagcgagccggatgtttccccgataaagccgatgcctttgcccgccatgaccgggacggtgtagattgtcaggctgtccagcagtccggctttaatcaatgaagtaagcagcttgccgccgcccaccaccagcatgtcggtttcctgtttcagttcatagaccctttgcagcggttcttcggtcaggaactccaccccgcagtccggtgtaacgttggtgtcgtagtgtgacaccacaaaagaccgtttgcttttgtgcggccacccgccccagtgttcaaagatgtagttgtaggtgttcgcccccataagcaggcagcttgcggcggcgtgttcccttgccgccagttccttgacctcacggggcatccagtccagttcatagtccggcgtggcggtatgcccgtccagcgatacggcgatgtgcgctttgatttgttccatattatcaggtattaaagtgatataaatccctactgtcttggcacgttagccgcccccccaaaaaaaaagaaagcgtggcatgacgctgtttcgatgcgaggtactggcatacctaaatgtggaaacagtgcagccacgctatgacaaacgcatagcatatcctgcgctgaatatccccacattttgaaaagtgccagttttcgcatcgggacgttcggcgaacgtatatgttatatataaaggcaatattccggcaaccgccgtccaactgccgttacttttccgtgtaacttctgcaaagttaagcaaataccctgaaaaaatcacgtgtaaacagaaaaaatcctgccgtgttatcacaacagggcaggacacaagcacatgaattacacaagtttcatccatacgcttatggacaacttgcgttcctttgaagattatatgaaccgatgacaaaacagctttggttcgccgtgtctttggtgatgatgtccctttcccgcatgaagcggatatagctctttgcggtgcgctccttgatgtccaagacctgctgcaactgctcgcaaaggtctatgtaggtgatgcgtgtctgccgcccgaagatgtcacgtgcgacattcaccagttccctttccttgcgcttctccttttcctcacgtggtttctcgcccttgtacacgtgcatcccggcttccttgttccaagcaaagagcatcagcggcacgtccagcgggctaccgtcccttactttcaatgctttcaccaccgactgggtaggttcttcgtctttctcaatggacaggatagtagccgccttgcgctgcaactcgctgcccaaatgtccccgcagtttcaatccgttggggacgaagtgcagcacgcacagaatacacgtgttgtagatacccgccagccgataaagttcatctatcaccgccacgctttccgcttcatcgttggcactcttaacaaggtctgcgatgccgtcaatgacgaccaactggatgccgccgtactggtagtagaacttgtccatgctttgtacaatggcgttcaggcgttctttgcgtgacatgccggtaagacaaaacgctttcagttcatcgggcttgtccggctgtttggcacgtgccagcaggttgcttacgttcttgaacagttgcacttccgactgttcggtgtcataaagcaataccgccttgtgcctgccgttggcggttatctgtatgcccagtgtatctatgtccgcaccagccggacagatgcagcccgccacgattgcggctacataattgctcttgcccgttccctcgcccccggtgatgccgaacaggttgccttgtgtccccagcggaacgtcacccgccgaaataatctcttgcgctttggcgggcgggttgttgaaatctatctcgcacgatttaagcataatcaatgtgtcgctatacaggttgtctaaaaattcgataaacagtttcaggaaatcctcacgggtgttcccggctttgaagtagtcggatatgtccttttcctctttcgttcccggaagcggcagcagtaggcgtttcacgccaaattcttccaacagtttttcctgcttgcatgaactttccctgcccgtcttgtccatgtcaaagagcaggacgatgtgcttgaaccggaatgtcagccgatagaccagcgtgggcggtatcgtcaccgtttcgctgttgaagcagatagcgtgaaaatcgtgcgccgccagcgaaagcacgtctttctcgccgcccgtgatgaatagcgtgtcgcctttggctggcagttgttccagcccgaaacagtaattttcgccgaagctgccgccgtagaggaagcggggcgtggagaacgggcggtacagcttgatgtgctgtttgcccttgtagccgtacatgggttctgccaccgatgaagtgtaggtgtacggtttgccctctgccgtttcgctgttgtattcccggagcgagcagaccttgtaacgttccagcagttcgggcgtgatgccgtattgttgccagtacaccagttcggcaagcgggaacttctgttcccggaactggtagggcttgacgggctttccgggcgtttcttcggctttgtccggcactgcccggcggacggttgccgggggaacggaaaccggagtgccggaagccatccccaagcccaaatcccggtcgatgatttccagtatctccacgaagtcagccgcccggttgcagtccagcccctttaactgccccacgaggaagaaacagtcgccgctgtaactgtcgttgccgaagtctttcatcttgtagataccgccccggcggtcgaaatagatgttgcaggaagccttgctgtcctcgtacagcgggttaaggaagttacgacctatgcgccagttgccgggcaggtagtgtttgaacaccgccagcccgttacttgttctttctaagatttcctctttctttagcatacaactggtggttggtaatcaggttgtcgatgttctccttgttgctccttatcaggcgttcttccagcatccggcgtatctcgctgaccttgtagaagtaacgtcccctgatgttggaataggcgatagtccccgacacccgcaggcgttgcagggtcttttcgcttattttcaggaacgtgcagacctcgtagctgtccacccacatgtcttcctcgctttgccttgccgtttccatgtggttgaagatgtaatcggcaatggcggtaatcttgttgtccagttccttgtaggctttggactcgaatgttattatttccataacggtaactgattgatttgccgcaaagttcgggtgtcctgaaaaataaaacgccacagatgtacccacctgtggcgaaataaattttgttaaagcacggttgcctaatcctgctccctcatgcgcatcagcaacctgtctttcagggtggagaggaagcccgttcggtctttggtcttggcttttagttccatgtaggtgtggtagaagtcgccgaggtcgatgtcgaacacgtattcaaagtaggctacaatctccttaatatcaaccgtccccttgttcagacagccgcaggcgtccagtgcgtagataagttccaccaacgcccttttcgtccccgtccagcgcaacacctttcccatgaagccgttcttcacccgcttgcgttgttcccggcgttccagctcgtgcagacggttggtgaggtatatttccagcagttcgttggctaaaatcttggctaccttgaaatcgtgactggtgctgaactgtgggtctgtttcgtaatagaaactgtccacgatgatttgtatgtcaggcttcccacgcatgaaatactgcctgtccaagtaggtggctttcgttcggtggtactggtagaacgccaagttccgctggaacgactttgaaatccggtcggtttccgacagcaggtagtccctttgcacttcctcgctgccgctggggaaacgtacctctatcttgtaaacggtgttgtaatagatgattttgctcgctaaaagcggtttcagttccttgaagaagcgtatttcctcttccgtgctggcgaacgggtaggagattataaagtttttgagttcgcccagtatctcttgtaggtagtccacgcacaggcggcagagcgtcagcgtgtccgctgcggtgtcctcgtattcctgtatctgccattccactttttgaagcagtccggcgaagtatgtttccaacggtatcttatgttccataaccttgtgcttatcttttatgaagcacaaagttacgggcataaaaaatctgttttattcttgatttttcacattacgttcttgtaactgtgcattttcttgtttcctgcgcttttctacgtatctcgcccggcgtgtccagcaagtaagccttgcagaagtcgttcaggttcgatgtcgatgcaaacccggtggtgaacgccacttccgtaagcgttaggttggtgttcttcaggtagtgttccacgtcctttgcccgttcctttaccacccactgctttgccgtgtaccccgtcagccgctttacttttcgccggaacgagccgtattccattctgcatttctccgccagttcttcggcatcatagaccttgtagcctttcagacgcaccatttcggtgaacgtctgcctgcccagttcgggcagcatccgttcggcgtggcgcagctccttttccgtcaccagcaggcggttgttcctcaccgggtttctccgcagcaggtggaaagcgtagcataccgtgttgtacacgttgtagaggtactgtcgccccgaccgcatccagtggagcgcatcgcagtaggcggtcagttcggatatttcatcccgcttgcggtgttgttccgccagttcgtccagtatggcgtaatgggtggtggacatacccagcaagatgataattgccttgtagtccttgtatgccgccagtgtgggcgtttccggcaggcttttgagcgtgtcgcacacgtgggcgcacagtcgcccgtccttgctgaacggttcaagttccaagtagttgtccattttccggctgttgtgcagcagccatgttaccttgttatccaattccttgcaggacgcttccagccccgctttggaagcggatagcagcagtgatgtgatccgttgttccatatttcaatgacattaaaattaatatggcatgtaaaatctatctccaataagtgcgaatacaatcaaaaagacaaatggaaacagcaaaaacaagatagcccaaacgctggaatatttttcatacgacttgtcttgccttattttcagataccttatcctgtagtaataatagatttgcggggcaaaccacactatcggcatggagagtttgaaaaaaggcagcggatttccgcttgtggctgcggcataaatcagacacgcatcgagtacgtaaagcgtcagggcaaggctgatcacgcccgtagcgtaccatgggaatattcccatgcttgtccgccggacaaaacggtctgtcttgtaaaacaaatatccaaatattctgtgcattcccagtctagtttgacaagagctgcgtcttgacttgttagacatattatatatcaagtaataattttcttattgttatatcgaataataaattttctatcgtcaattttaattcgttaaaatcgttttgttcaagtggagaaaacaatagtttgatatgttgatatataccagcattccaaggtctattctcattgacataaatcaacaaactaccgtttgagatattatattcaaaaaaatccgtatcaaaatattctccatttgaaggatcatttaattccatataaactttttcatccatctcaccctttgtgattttataatatccttcatcagttatacaatgaagcatactaataccattactattttggggagtgaaagacatttcattgacgacaagtactgaaatttctttttttgtcatattcatgttactattaatggctaagcggggaacgccgtaccgcatactctatcagatacaccgccgctttcagtcccaagtagatgccgataagaaatggcagaagaaccgacagggcgggctgcgcgttccattcactcataaacaggcacagtacggcaatccctatcagtatcttctccacccaccagtagcaccacagaaacggagtcaggcacagttgccgctgcctgtcgtacaccctcagacgttcacccttttgtgtggatagaagtgtaatagccatcagtgcaagtattgcatacctgaaccatgctcccgtgaaggtttcagggaacatcatttgacttatcagcagtaggcagatgcctatgctagatatttctgtgagaataaatgaccttttcatgtttgttaatggtttggtgagcaacagcgtttagctgttatctcgaccttgttaacattctatttttattctcatcaaattatggtatttccaaattcatcttcttcatatatgcagtatctaattcagctcctttccagtttatgtcaggagggaactgttcccatccgcctttgggtggtgcaagcacccatttaggaacaacctctaaaagtagctctgaatgttcaacccatttatttgaatatttgacaaccaatcttagatttttcaaatctttatcatgtagtccaaaccttgtatcaacaatataaattgaatcacccactttgtaattaaatttgcagattgaaccacgataatatcctatgtcagaaaacgtgcctattgtatatcttctattatcctcattaaaaaagaagaaaaaatccagacagcgagtagcaattattataatcaataaaattgctattccgatataaattattattctcctactgtttaatcgcataatttgaagattataatgttaatggtttgcagcttgccactgttaagtggcacaggtgcttgttagcaactacattaataataagtcttttccatttctacaacttcatttgcattttcatcccaaaagagtgttccacatacttcgcacttttcatttgccatattgctttcctcttcaatcaacatgtcataacatgcaaaatctttacaattagggcaggttatggaaataaccactcgaccttgcttttgctctaaagttgataacttccaaaaatcagattttatagactttagttttttggcatcttttttataagccaccaatatgttataagtgtcattttctaagtcaagcaatacaactcttgccccaagcttttccaattgcttatcaaaataggataacgcaaatggaatgaaatcacctcgtttgggttcttctatttcttgattatatttttgataaacttcatcttcggacacaaccaattgtacccccaacattgattgaagtctgttgttgaagaagttatacaacattccttgtctatcttctccactccaatccactattaagaggaaatttttatccactaatttatagaacaggctttcatcgtctttaatagtctgtacattcatttccataagttctttttctccaagaacttttgcgagcattgttttatagttcatatttcttatttttatttgttgctaatggtttggtgagggacagcgtttagctgttatctcgaccttgttataagctaaatttttctgttattatattctttatcattttagcatctgtgctatccagcatatatatgctgcatagtttacttagagtttgctgtatctctgcatccgttatccctaagttaaacattatacctaaaggaagaaaccaagagttaggaacttgctcgtcctcaatctttacctttggtatatggctttctgcgtcattttcacaacttaatacacatcctctgtcttcttcttgtagatttccggtagcatctaattcggcactataaaaacgcttttcttggcttctctcataatagccataagcgcaacgatattcccataaatctatcgagaagtaatagacaccacattttgctgaaaaccttttactcaatgtttcgtagatatatcgcaaacatttcccttcaatgatataatatccgttaatgaatgacgaaatcaataccttatcaaccctcggtaaaaggtcattaagataattgtctgcattttcataagtagtacaaagtattgggttgttatcccactgctcattttcagacaaaagggttagtcccaatatgtctgcaacatcttttctaacggatgcaggtattaggagccaatcagcacagctaaaatgttcttgtacttgttcgttcataatttgatgtactattgcttataatggtttggtgagcaacagcgtttagctgttatctcgaccttgttaacattctatttttattctcatcaaattatggtatttccaaattcatcttcttcatatatgcagtatctaattcagctcctttccagtttatgtcaggagggaactgttcccatccgcctttgggtggtgcaagcacccatttaggaacaacctctaaaagtagctctgaatgttcaacccatttatttgaatatttgacaaccaatcttagatttttcaaatctttatcatgtagtccaaaccttgtatcaacaatataaattgaatcacccactttgtaattaaatttgcagattgaaccacgataatatcctatgtcagaaaacgtgcctattgtatatcttctattatcctcattaaaaaagaagaaaaaatccagacagcgagtagcaattattataatcaataaaattgctattccgatataaattattattctcctactgtttaatcgcataatttgaagattataatgttaatgtatagcagggaacggcttgccgttatcctgcgttgttagtgatattgttacttatattcaatctccatattactatctttgtaatactcgctgttagcaagcatagtccaaaagtaaaaagtcccacaaaatagaaagacataatgaaaatgcttaaaatatagcttaatacttcccacagagttataggtgctgtacttatcacatgaactccacgacaagataaaatgataattggaacactgcaaccaatagttaagcctgcatgaaacaaaaacgtagtaagcaacccacacaataaatacttaacgtaagaaaaagggtgtacccaatgccatgcaaaccagcttgcaaacagcgcagaacagcctacacatatataagagcctataactcccaaaagatgcttataagtatccattggaaatgctgtatccataaatacccatgctgtcagcattgttaaacttatatatataatttttgctatatccatattttacacaattatcactaatggttagaaaggagcatcgtcagatgctatctttcgttgttataaacttaattgttcttgctcacttacattttcgtttattagtctgcacatatattcttgcaggcaataattatatatttcagcagtaagtaatgattttatatattccacattttcatatatgtatttcattttataagctaatatttcaaagggcatatcttcgttattatatgtagccattatctgccataaatttgaaatcgtttggcttatatcattatcttggtactgtttattggcttccatattctgatatttatagatgtaatactctgtgtatgctggtatgcggtatgtttcatgtgcaaagccagttccgcccccggcaatacatctcaacatatcatttacacaatagaatattttgtttaatgtcttacgttcacaacgatagtgtttcctattattggcattaaactgtgcataccatatacaatataagtcaaatccagtttctccatagaaataaccttgcaatgaagtatattgttggcggtataatgtatcgggataaaccgctgccgaatttgcaaacaatctttccgcatcttcttctatatagcggtactcttttttactttgtttacggaatttatcaatattgagtatatcatcttgtatgttacgttcacacagagttttactacaagagcaacccattaccacgaaaatggcaagaacaaatagtactatgtttgcaatgcgatacatattgtttataatgggttggaaaggaacgccgtttaggggttatctttccttgttataaacttttttatttttccaatggatatataattctccattctttagtcttttctctccaactattgcacataaaagattattttcataggcaaaattatattcctctgctggcatattgtcccaacgagaagcatacctatgtactttactaattctttctttatcatattcatataaatacactgaccaatctttatatgaatttataccctgaaagatattcatttcatggtatggataaaaatagcttattgagattatggttgtatattgattgggtatatatttaacatgatatacataatatgaaaaggcattatcatactcatatatatcagttatgatgccatttcctatattatctggagcttcttgcgaacaaagtatttttccttctgcattaaagccaaaagaatacagaccagctatttttagacggtctttttcttcaatattttttcgtattcgtccgtttggtaaacccgctaattcattttgatagggagcaggaacataaaattcatgtgtagcatacttccatgaagagatttgtcgtaaaacactttcaactttggcatgaatgacaagctctgactgttttaaccgttgatacagtttgtcattcatttccataatatgtatatcattctttatatccattggctttattgtttataatggttagaaaggagcatcgtcagatgctatctttcgttgttagcaacctatttgaaataattaatcaatttatcgttattaggaatattcccagtatgccacaaatggatttgtgactttattaccttcaatttttccataaacatatatacagccagccatgaaaacagaaatatcttttatgcaaatttcgttgatttgaaaaatgaagctatttccatctttaaccactttaccatcattatctaatccccattgaataggcattacattacccccaaatttgattgcacaatttttttcaggcatatctttttctgtactcatttcgtatattgaataaatttcatctatttcggggtgtttatatctatcacttttgctttgactacttaattcatgttcaaccaacaacaatttacaatcgggatatgtgttatattccaatgcaacatcaaattccggagtgaaaatagatatttgcttgttgggatttaaagggttttgaaatgttagataaaaatagagattatctttgtccgataaatacttatcatcaaaacaagctggagcatttccaccaacccaaccaaagcagtctttttggtattcaccaatgccgtagtatattgcattttctcttgttttaagtattctttctatatccataataacgataatgatttgattgttgctaatggctaagcgggaaacgacgttagtccgttatcccggtttgttagtaatatattctatcgcactcgcttcaaatccccaataaattggagtaccgtttctatatatggaatagcttttagaattttgatattatctattgattctataccacccgataccaatgctgggacatatccgtaacattcatccaatgtaggaacatccttttctgattttatcataggatatttatttaaggagaaccatgattccaaacaactcttgttgaaaattaccacattcaatagtatatcaacattctcggataaaatcttgaatgttccgtatctcacattgatgaatacgacataatctcctatcacgggattcttaacataagcaaaaatatctccaaaaacagttgtcataaatggagttacagtttcatactcatacagaggataactatcatctactattgtctgatatttattggggttaataattctgaacaatccatcacaaaacgttccaagtccaacttctttccaaagttcgataattttttctgataccgcattagcatattttgcaataaaagtatcatctaccgtttggcgagtgctgtttaggctcttatctaaaaatttttcgtacatattgattgtgctatttattactaatgtatttataagatcacccgtaaggtgctgtatattttggtaaacaacacccagcaggtgtatttcctaatctctaatagctgcaccctatgaatcatccagtgaatcaagaggattgggtatttgggatttgtgcgcacttgacacatgtagatatatggtagtggtcttgatgtcgttgtgtcccaacaattcttgtatggtatgcaaatctgtcccttgttccagcaggtgggttgcaaacgaatggcgcagcatgtgtacatgtacccggtgcttgatacccgcacgttgtgcagcttctttcagcactttcaccaatgcgcttgccgagtattgaactccgggcgtttcgccctcaaacagccatttcttcggacggtattcccggaaatactgtcgcagttcttccaacagcttgggcgaaagcagcgaataacggcatttcttccccttgcccatgatgcgcacggacatcgtttcactgttgctgtcttttggggtgagattcagcagttcactacgccgtaatccggcagagtataccaaggaaatcatacagcgatgcttgatgttggatagctggtcaaggatgcgcttaatttcattcttgctcaacacttcgggcaggctcttgtactctttggcacgggtgataccgccgtagtattgccgcttgccgcctttcacctgctcgtaatagaacttgatagcattgatgcgcatattctgttgcgacaccgaaattttcttctcgttcacaagatagagtatgtacttgttgatgtccggcactttcaggcggtcgatgttccgtcccttgtgatattccatgaagtcgctgaaataagcacggtatgttttgacggtcgaggggctgtaacgcttttgttccagcagttcgagatagcctttcggcagtgtgtattcccttttgggtttgggatgccgcacgtaaacccggctgtaatcaatataggcgtggggtgaatagcggtcgtagaaatccgacaggctgaaagcggctgacgctatgtatgcagagccgttgccagccatttctatgcccgtttcttgggcgagcagcagggcgacagcctgactgttcgcatattctatccgtatgtagtccgcaccgtcccttgtttctttgtgtagcacgatgcttcctctttgtttctgaacattatccatgtcgctgaattttgcttcatgctccaaagataaaacaaaaacaccatatcttaaacatgcgttcaaaaataatagaggttaaaaaaacaaaactgtatcaggctttaagcagcgaatagatatagcgaaagttttctgccagttcgtccacgttcaaaccgtttagaaatgcttgttcgtatgacagtcctaaaaacatttgccggaacatgatagccgttttcttcacgtccgtgtcactcctgatttccccgctttcttttgctttctgtatgactttctcccataggtcatagtcttgtcggtagattttctcaattttctgcctgatgcccggatagtacatgcgcacttgtgacagaaagtgaaagtagtagaagttaggactacaatcatgcgggctgctattatcgccaattagttcaacaatccttttcatggaagcggctacccccgccacgtattgcccgatgaactccgccaacgtatcggcaggagcggcaaacttgttttccggttcgtgcatttgcaacacgtatttgtccgccacagccatgaataaatccagcttgtgcggaaaataataaacgatacccgtttttgtcaccccgcaggctttggcaagcgtgataatgcttgctttctcgtagttcatcctgacaaatacgccgaacgctttatctattacttcttcacggttagttattatcatacacgtttgtttttaatcggttacgaagatacggattttgttttaagcatttgtaccccagtgcttttttttagtgcaaggtgcaagtatatatttatatatatagcttgcaccttgcactaacccaaaaatatttattatcagatatttgcgagtttcaaaagaaagccgtatctttgaacccgaaagttaggcagacaaacagcggtcaaagttggacaagcccaacatctgaaaatcgttactgtttcgttacctatttgaaattttgaaagcaaagtagctgaaatataagcggttagatttgtaggttcaaaaccctgtctctccgctagaaagcagctttttgctgctttctgtttttatggagagttttttctctagttggtaattgtaaggagaggtgctcgagtggttgaagaggcacgcctggaaagcgtgtatacccctaaagggtatcacgagttcgaatctcgttctctccgcatcattttttacattttaatattaatgaacggctgttttgacttatcaaggcagccgtttgttttatattgttttcgggaattcggttattccaattcttcaataatcttctttacatctaccggttgtaatcgaccatataccttctcgccgatcatcactaccggagccagtccgcaggcgcctacacaacgcagacagtctaatgagaactttccgtccggggtagtgtcaccgacttcgatacctaatacacgtttgaactcttccagcagtttttctgaaccacgtacataacaagctgtacccatgcaaacagagatgggatgttttcctttgggagtcatggtaaagaaagtatagaaagtgacgacaccatacactttcgatacgggaattccaagtttggaagcgataatccgttgcgtttcctcgggtagatacccttgcaaatgctgtgcctcatgcaaaatattgataagttcgcccggtttgtttccatgcttgtcgcagatcgttttgatttgctctgccatgtcacaggctagtttgatatctgacataatactcttcatttaaaagttaatcaatcgctttgttgaaataatgcgtatgcaggagagtttccgatttctcacctagcggtttgccgagataatcctcgtataatgtcttgatatacggattctcgtgcgatttgcgcaaaggtttgttggcgtcttcacggtaaagtgcgttggcgcgtgcatagagtatttccgagttgccgtgatgcaaaggctgcccgccgccaccgatacagcctccggggcaagccataatttcgattacatgatattcgttatgtccgttccgtatatcttccagtagatgacgagcgttgcctagtccgtgtgcgatgcctacttttaattcaaatccgtttaggttaatggtagcacgacggacgccatttagtccgcgtacctgttcgaaatttacatttttcaaaggttctccggtatagatttcatagacagaacggagggcggcttccattacaccacctgttgttccgaaaatgacaccggcacctgtcgattcacccatcgggttgtcgaatgggctgtccagtacgagagggaacccgatattggcacgtttaattagtcgtgccagttcacgggtagagatagaataatccacatcggggataccgttcactttgaattcatcacgtgcacattcgtactttttagccagacaaggcatgatagatacgacaaccagtttttctctgggtatgcccattttctccgcccaataggatttggcaatggaaccgaacatctgttgtggggagcgggcggtggacggaatgtccagcatgtccgggaaatgatgttcgaagaagttgacccatgccggacagcaggaagtcaggataggtaatcgtacggatttatctccgttgagataacgcgtcagacggtttagtatttccgatccttcttccatgatggtgaggtcggcggcaaagtcagtatcgaatacatagtcgaatcccagttcacgcagtgcataaaccatttttccggttaccagtgtgccgggaggaaaaccgaattcttcacctaaggcagcacgtacggcaggggctgtttgcacaatcaccactttatccgggttagctaagtcgtcgagcaggcggttcgtataatcgcgttcggtcagtgcacccaccggacagacagctacgcattgtccgcaataggtacattcgctttccgtcatcatccggtcaaaggcaggggctatcgtcgtgttgaatccgcgacggatggcaccgagcgcaccgactgtttgaacatcgttgcagacactttcgcagcggcgacagaaaatacatttatccatgttgcgcacgatggaggcagtgatttcccgcttgcggggagagagctcgcctccattgaaaggcatttcgcggatattaaagcgtagcgctaatgtctgaagttcacaattgccacatttggggcaggtgagacagtcgttgggatgatccgacaggataagttcggctaccactttgcgtgcgttcatcacacgtagcgtactggtttttactaccattccttctgtgcaacgggtagcgcaggcaggagccagattgcggcgtcctataacttcgaccacgcagatgcgacaggaagcaggattgttctttatgcaggtgcctttcaggtcgatgtgacacaaggtaggtatgttgatgccgattttcgtggcagcttcaaggatggtacttccttcggggacagtgatgaaatgaccgtctatctggagagtaatttgtttttcttccatagtaaataagattttagcagacaagaatagcattgaatttgcagcgtgccatacacatgccgcatttgatacatttatcgggagcaatgacatgtggcttacgcaccagcccgctgatagcatccgccggacagtttttggcgcatagatgacaaccaatgcaacgttccggactgatggtatatgttaatagtgatttacattgcttggaacgacaagtcttatcccgtacgtgttccatatattcatcgtagaagttatccaatgtggataaaacgggattcggagaggtttgtcccagtccgcagagggccgtatctttgatgacttgtcccaaagtggcaagtgtgtccaggtctttttctgtgccttttccttctgtaatcttgttcagtagttccaacagacgtttgtttccaatgcggcaaggtgtgcatttcccgcaggactcttccactgtaaaatccagataaaagcgggctacggataccatgcagtcgtcctcatccatgacaatcatccctcctgaacccatcatggaaccggccgagagaaggttgtcaaagtcaatgggagtgtccagatgtttttctgtcagacagccgcctgacggtcctcctgtttgtacagctttgaacttctttccgcctttgatgcctcctccgatttcgtagattacttcccgaagagtagttcccatcggcacttcgatcagtccgacattattaatctttccggcaagagcaaacactttggttcctttggaacgttctgtgccaatcgttgcaaaccagtcggctcctttggttagaataatgggaatattggcaagcgtttccacattatttacattggttggttttcccagataaccggattcggcagggaagggaggtttcagagtcggctctccccgttttccttccatcgaatgaataagggcagtttcttctccgcagacaaaagctccggctccgtatcgtatttctatgtcgaaactgaaatctgttcctaagatatgatctcccagtaatccgtattcgcgcgcctgattgatagctgttttcagtcggttgatagctaacggatattcggcacggatatatactaatcctttggtggacccgatggaataaccgcagacacacatcgcttctacaatcgaatgtgggtcgccctccataatggaacggtccatgaatgcaccgggatctccttcgtcggcgttacaaaccacgtatttgacatctgactgttgcttgttggcaaattcccatttcagtcccgtcgggaaaccgccaccaccacgtccgcgaagtcccgaacgtttgataatatcaataacgtccgtcggctgtttgttaagcaggcaatcggccaatgcaaagtatccttcacgggcgatatactcttcaatattttcgggatcgataaaaccacagttacgcaatgcgatgcggagttgtttccggtagaaatccatgtgcttggagtcgctgacggtatgttccgttttgggatctacatacagcaaccgttcgattcttcgtcctccgatgatatgctcgttgatgatttcttccgcatcttcgggagtgacttgggtgtaaaaggtattatcggggataattttcacgataggacctttttcacagaagccgaaacagcctacggtgatgacttctactttatcggtgatttcgttctttttgatggcttttagaagattgtctgtaataccctggctggaagatgccttacagcctgtaccaccgcagatcagaatctgaagatgttgcgcaccggatgccagtccgtaacacttttcagtcaccttttcattactttcttcgcgcaatgaaagattgtgctctgctctcttcctgattgttgccaaatcatggatagataaaattttcataagtatcagaattgttagtcggttttttgcaaatataattctttgtttgaaataacagcgtagtctcgtacaaataaaattgttctttgacggaggatttaggtaaataaatctctatcttcgtatttaataggtatcaaacctaaaaaatataactgaagtatgagacgaattttacttggactatgttttctatcttttctgaacagcgcatccggacaagagattcctttgccggaaaagatgccgcagacacatccgcgggtactgactactccggcgggaaagcaggaaacatggaagctgattaaaaaagaagaatgggcgaaagatgttttcaataaattgaaggaacggacggaagtatatacgaacctgacggatgctcaaccggcgtggttgctgtctcgtttggcaatgtactggaagtctcatgccacggaagtatatgtgaaaggtgaaacgttcgaccatgcaggtggtgaaagagctccttatcccactgtgcgctacacgggaacccgtggcacagctgccacccacggtcgtcccaaattggcggatgtcgttccttatgatgatgaggacgggaatgtcactttctgcaataatgcacttcctgaccgtcctatggaaagtgtacacccatccaaaacaggccggaatattgaaagcctgaactgcgaaatcctgggaattgcccgtgatgccgctttcctttattggatgacggatgaagagaaattcgctaaacttgccgcaggggtctttgatacatatatgacaggcatttattatagaaacgtgcccatcgacctgaatcacggccatcagcaaacattggtaggattgacttctttcgaagtcatccatgaagacgcactccatatcgctgtccctttatatgattttctatataattacctaaaggccaattacccggataaaatggaaatctacgccggagcttttaagaaatgggcggataatatcattgcgaacggtgtacctcataacaactggaatttgctacaggcacggtttattatgaatgtcggattggtattggaagacaataaagaatatgccgacggaaaaggacgtgaatattatatcgactatgtgatgaaccgttccagcatccgccagtggagtctgacgcgattggcagattatggtttcgatataaatacgggaatttgggcagaatgtccgggatatagcagtgtggtaatcaatgattatgccaatttcgtgaatcagtttgatacgaatctgcaatatgatttggtgaaagcaatgcctgtattgtcgaaagcggtagcaaccactccccaatatctgtttcccaaccgtatgatttgtggctttggagatacgcatccgggatatttgagtacgaatttctttatccgtatgatacagaatgcacaggcgaacgggaagaaagaacaggaaaactatttcacggctttattgaaatgcctgaacccggatttgggaaatgataaaacagaaaagaagaatgtgcgtgtatctgtcaattctttctttgaagataaaccgctgacgctaaatcccaaagtgcagccgggaaagatagaagattatgtttctcctttgttttatgctcccaatgtgtcatggctggtacagcgtaacggtatgcatccgcgcaacagtttgatgatttcgttgaatggcagtgaagggaaccacatgcatgctaacggcatttcgatggaactttatggaaaaggatacgtattgggtccggatgcaggtatcgggcttttcctgtatagcggactggattatgcggaatattattctcaattccccagtcataatacagtttgtgtggatggaatatcgagctatccggtgatgaaaagtaaccattcttttgatttgctttcctgtttcccggcatcagcggaaccgggcaaagcatttacgtccgttacttacagtaacctttattttcgtgaaccggaaagcagggcggatcagacccgtatgatgagtattgtcactactggggcggagacggggtattatgtcgatgtattccgcagccggaaagagaaaggaggcgataagatgcacgattacttctatcacaaccttgggcagactttgacattgacggcagcagatggcagcgacctgaatctccagcctacggaagaactcgcctttgcaggcgcacatctttacgcttattcctatttatatgataagaaagtggctgcgaccaataaggatgtcaaggcaactttcaccatagatatgaaagataaggacggcgatgatatatacatgaatctttggatgaaaggcgaaccggatcgtgaagtctttacggctttggcgccaatgaccgaagggctaagccgtacaccgaatatgccctataatataaaggagcagccgacgctgacatttgttgcccgtcagcatggagaagcttggaatcgtccttttgtctcgatatatgaaccgagtacgaaaaaggaaccgtctgctattcagtctgtttcttattttgatgcagaaggagcaggtttggaagattttgccggaatctgtgtgaaaagcaaaaacggacgtatagatcatatcttctctctatctgatgctgcacaaaccgctacttatcaaggaatgaaagtgaaagcggattatgctgttatcagcaatgaatatgcaggaaaccggacgttgtttttagggaatggaacccaattggttgcacccggggtaatgattcagaccgacaatgccgctaatgtattgctcgaaaagaaagaagggaaatggtatattatttcttctgctccctgtacggttgttatcggcgataagaagataaaatccgatgcttcgtcggagcctatgttgttgcgtatctgatgtttcattggtaataaagaaaaattgtatatcttatccgtagtatggtatattatggcctaagatggaaattgttgcaataaaaaacaaaaaaagcgtgtttaaacgtttttaatactatattttttctaattttgtggctttctgtccaagtagtatataaaatggacagtaagccctttttttgtgggtaaatatttagtggtaaatatttagtgggaaataaatgatggtatatgtgatgagaaatggtcgcagggtaatagctgcgttatcatttctgttattatgttgtggtgtacatgtgcacgcacaacgggtggctgtaaagacaaatgcattgggttggctgaccgccagtccgaatgtagaagcagaatttgtattgggtagtcatgtctccttaaacatggggattgctgcgaacccaatcagtacagacaactttaaaacgactttcacgcattttcagcctgaagttcgttactggctaaatcgtccgatggtgagtcattttcttggaatcaccgctttcgtgaataattttgatatgatggtaaaagatgtgcatcacaaaggcgatgcatacgccgccggtttgacctatggatacgcatgggtgctgggcgatcattggaacatcgaagcaactgccggagtgggtgtgttgcgctaccgtcagtttaagtatgataagggtactccgaaaccgggtgcggtcaacgatagtaagaccaccattgcacctgtcaaactgggggtatcctttgtttatattattcgataacgaacattagctagtcagaaaagagaatgaaaatcaatttgaaacgtgatagattaacaggtatacttctcgtggcgatgatgttcgtcggtatgaatgtatccgcccaacggatccgcgtgcaggggcatatcacaaacccgcagggaaaaagtgttccgaatgtaaatgtgttgaatccggtcaatgacgaacgtatagaaatgtccgacgaggatggtcgttacagtgtcttggttgagaaaaacggctcgttgaagtttacatgtgtcggttatgaggacaaaacagtgaaggtggcaggaaagcagattttgaatgtagtattgaaagatgccgtcatcgaactggacgaagttacgattacttccaaagtgaaggacaaagtgattccggaacctacggacatcgaaatcaaaggtaattattttcatctgaaaacccgtgtcccggtgcctaaggagatgtttaactcacatcgtcgcttggtattgcagccttccatttatgatgtgacactgaaaaagcgtctgttgatgcgtcctgttgtattcgacggggatacttataatacaacgcaaaatcgaatgtacgattatgatatggataaagatcctttgcacgattacatccgtgtgaaaactacttcttcacgcaagggggatattattgcttaccatgattctatctatatagaatatctgcaacatgactaccgtgcagatgtgcatctggcgatggaaaattaccggaatatcatttatcgtgactctttctccattgcacgcggaacggtcaacccgcttcgtttcttggagtataaattctccgctttcagtctgacggacgagaaatatcttccgaaacccgtgatgcagttgcgggatacgaaaggtgaggtaaacttaaccttcctggtaggtaaagccgacctggatgataagaatccacaaaatcaggtggaactgaaccgattgaatcaggaattgcgtggtattgagacgaacccggatgcctctttgaagagttttcatattacgggggtggcttcgccggacggttcttacgcgacgaatcttcgtctggcaaaattgcgtacggataaagccctggaacgtatactggcacaactggacccggaaacacgtaaactgttggaggtgaaatcggatgcatcggttgcctcttggaaggaggtagctgaattgctgaaaaaaaactccaagccggaactggctaaagaagtagaggacttaatcaaacaatatgcagctactccttaccggttgaatggggtcttgaaatcgaaacctttctacaaggaacttgcggctacttatctgcctaaattgagaaaggtgcaatatacgtatggttattcaatcttccgttctttgacggacgacgagattagagaactttacagaaagaatccgaaggaactgacccgtttcgaatattaccgtatgattacgacagcaaaaactcccgacgaaagggaaaagtattgtagggaagctcttgaactttatgataactttacgtatgcagccaatgaactggcagtggcaacgatacagaaagatactccggattcacgtattctcgaaccgtttgtcagtaaatcggcaccggcggagttattgtccaatcaggctattgccttgctgcatgaagggaaatatacaaaagcagattcagtcttgaccttggttcccgaagaagcggtttctgaagatttgcaggccattgttcaggcattggccggttattataatgatgctttcgaaaaggtggcggctaccagccctttcaatgaggtggtgatgctgctggcaatgaagaagaatcaggaagcatgggataagatttctaccatggatgtagagaccgcccgcgaatattatataaaagcgattgccgccaaccgcctggagaaaataggtgatgcgattatgagcattgagaaggcccttgaacttgatccttccttattggaagtagcgaaggtggacggtgatattattgacttgctgccggaagagcagaaaattaaataatgatatatacaacaagagtaaacgatgaatatcttcagaatcaacaataaatatgtagcagtggcaatcttcctgatgcttgctgttaccttacaggcacaggattatggtgcattgcaatatatgttacagaaacggcctgcaaatgaaaagttcgagagcaataaattcaatgaacatctctttttctctgccggaatagggccatacagcttgttaacaagtggagatagtcaggatggaatgggaatgaccgcccatctctttatgggaaagtggattactccggttcatggacttcggataggggtgaatttaggttatctgccgtcgagtatctacgattctaaaataaaaatgggtggcggcagcctggactatctgttgaatatgtcctccctggcatacggatacaatgcaaaccgttgttttgagttagtagggattgcaggtatagaagccggttattctaaggtgggcgacaatagcgatcgttccgaaaagtatccggatttgaaaggcggcggtcagctttattacggcgctcatctcggtttacagggaaatgtacgtctttcttctacattggatttgtttgtagaaccgcggatcggatggtataatgacggttttgcgtatacggaaagttggagaaactataaaatggctggttcggttctggtaggtctgacctatatgcctgctgctccgatgggaactaagattcatttcgatgatttcgataaaagttccttcctgaatcatatgtttatctctttatccggtggtatcagtacactgaaagttccgggaatcaagaatacgattaaaggattaggtccccagttctctgccggaatcggtaaatggttcagtccttcttccggtctgcgtttgtccgggacggttggactttcagacaccccttcgggcagtgcaagcggctactttaaacatgtcgatctgcatgcggactatctgttgaatatcaataatgttctttggggatatgatgaagacagaatatttagtctgatcggtattgccggagttaacctggcaggtacgaaaggagtggataaaaccgccaagtatgctccgggaataggagtcggtgtgcaaggaagtttccgtatcaactgttctgtggatttatttatagaacctcgcctcaatgtgtataataagagatatgcaggaggtcgcggagtaggtggcaatacggatcagctcggagagttgaattttggtttgacttatcatacgattgaccgtgcggcacgtccgaagaacggattctcaagcaatcacatcgcagacaatctgtttatgacttcgggaatcggtgtgcaaatgttcctgaataagacgaatcttgaaaaccttggttctttaggtccgcaggcttctgtctctatcggtaagtggttgagcccttattccggtttgcgcctggtgggtacgggtggattctttacgaactatgtagttccgggaagtgttaaagcgggcaaacttagacatgccagcgtcagtggtggtcttgattacttgtggaacataacgtctaccatgagtggatataatcccgatcgtatctttgatttaataggttcggtaggtgtcaaccttgcttatacttccaaatcagaccataagttccaaccgggtattaatgcaggcatacagggattatggcatgtgaatgattttctcggtttgtacattgaaccgcagattcgcttgtatggagataaattcattgaaggtaatctgggctttatgcagaaagacgtaatggtaggagtcaatgcaggtttccactatcgctttgttccttattcaaaagcagccaatcgcagcgtgtttggtcaggatgacaagcgttacttcatctccggtgcacttggattgggtagcttgctcgtagccaacaaagatttggtgaagaatgcaggtgtagaagcaaaaggaagcataggtaaatggtacactccgttatctgcatggcgggtaaatggaacaattatgtacaaggccaaaacgtcgtcgaagatgaatcttcattatgccggtttgggtatggattatatgatgagtctggccacattggcaaaaggatacagccccgaccatgtgatagatgttgttccttttgtgggagttacggccggactggtacgccgttacggtaagttccgagcagtgccgggactggatgccggtgtgcaggtaaagctgaaagtggcttcttctttgtatctgtatgccgaacctaaagtcggtatccgtaccgatacatacgatggctccgaacagggaagacctgaccgcgtagcttccatggtaggtggattattgtacagattcaagatgcctactttccaataagaagaaaaataagaaatcgaataaaaagggttgcgcaataccggattagtgattgtgcaaccctttttgtattccatttccaagaaattacggttacataaacgttacattaatattacttccatttctacctgataatgaataaaatgaatctttagaattcattttctcccttgctattctcctctacttttgctccagaaattaaaacgaaaacgtatgaaaacgattactgaagcaatatcgaaacaaagttcaaacagaagattagccgatttcctctttattctatgggcaggtggagcagcccttctttcttactcactggtttatacattgcgcaaacctttcacagctgctacttttgacgggatagaagcattcggctttgattataaagtactggttactatcattcagatagcaggttatctgatagccaagtttataggtatcaagttgatttccgaattgaagagagagaatcgcctgaagtttatactcgtttccattgccgtagcggaattgtcattggttgcgttcggagcacttcccactccttataatatgtttgccatgttcttcaatggattgtcattgggctgtatgtggggagttattttcagttttatcgaaggtcgccgcactacggatattttggccagtcttttaggaatcagtattgttatcagttcgggaacggcaaaatccatcggattgttcgttatgaatacattgaacgtcagcgaattttggatgccggcacttatcggtgcttttgcacttcctttattggctcttttgggatatagcttaacccgtttgccacaacctacggcacaagatatagaacaaaaaagtagtcgtgtaactctgaatggcaagcaacggaaagaactgttcatcgactttatgccatttcttgtattattgtttgtagctaacctaatgttggtagtgcttagagatattaaggaagatttcctggtgaagattattgatatgaacggacagtcctcatggatgtttgcgcaggtagatacagtcgttacattaataattctggcgttattcggagcgatggtctttgtgaaaagtaacataaaagttttggttgccctgctgggattggtcgtacttgggacagccaccatgagttttatatctttcaattatgattctctgcaattggatgcaatcacctggctgtttgtccaaagtctctgtctgtatattgcctacctctgttttcaaagcatttttttcgaccgcttcatcgcttgtttcaagataaaaggaaatgtcggtttcttcattgtgaccattgattttatcggatatacgggaactgtacttgtcttgatgttcaaagaatttgcccatgcagacataaactggttggaattttataatatattatccggttacgtaggactgatctgtacggttgctttcacctgctccatgatttacctgatacagcgctataaaaaagagaaacaactgaagaaagcgaaagaagccgaaatgagcaacgggataaaatttacgggagaaggtatggagccaactactttttcacaaatttgataaaaggtggacgatgaaaataataggactatatttgaaattctccttccttctatctctaatactaacgacttcccggataacggcacagaatctacccgatggcatacaatataaaatcaccgggcgtctattaatggatggaggagtgtatctgaagaatccgaataactttggcaacggcacggaatttaatgaccttcgcatcggtgtaaaagctacctatcagaactggggaatgaaactggaaatgggatatgccggaaacaaagtagccatcaaagatgcttttgccacctattcctataagaatagttccattcagataggacaattctatgagccattcagtctcgatatgatttgtagtacatttgatcttcgcttcaaccaatctccgggagctgtgctggcattgacaaatagccgacgtatgggagtagcctattcctatcgtacccaatattactatctgtgtggcggattctttaccgataatgatttgagcaacctgaaaaacgcatcgcaaggatatgccattgacggacgtttggtttaccgtccactttatgagcaagcgaaactgatacatataggattagcagctatccatcgtacaccggacggcacgcttcccgaagatgagaacaggaatacgtttacttataaatctccgggcgtgagcacgattgataatcgtacattaatacaagcagatgtagatcatgcagcatcccaatttaaaataggaaccgaactgctaatttactatcataaattctttcttcagagtgaatacatccgcgcccatgtaaaacgggaaaagggttttgagaactatacggcacaaggagcttatctgcaatgttcctggctattgttgggacagaattatctgtatgacgaagaagtagcctgtcccggaagaccggaaggaaaagcactcgaactatgtgcccgtttcaattatctctctctgaatgatgccggaataaaaggcggaacacagaaagacctctccttcggattgaattactatatcaataaacacattgctgtcaaattgaattatagctacttcatccccggctcgcatatcaaagagatcgaaagcacaaactttagtgtagtacagggacgttttcaattcatattctagtacttggcagttccgttcgaataaagctataataaagaataggaaggtgtattgtatactagttttactaaatgtttcaaagacatatcgagagcactgccgactcaatatgcagaaccgtatgtaaaaagtaaaaaataagaagactgaaaaaactggaatgttctaggtaaatctcctttattgttcgtaatagacaataaaggagattttttgcattggttattttttctatagtttctgttaccagtttgccaacctgggtggaatagaaagtatagttttagaaagaacttcaataaacagaataattaaaatataacatagtttagtgatatgaatatagtaggagttttatcaggtaaaagaaaatgtttgttagcaatagctattgcattttcgacattcgggaatgcccaattagtaatctatccggaaggattgaacactggtatgccacataatgatgattatacagtcaaagtacgtgaagcaggtggtgaatggaaagatgtattcgaatatgaagtccaagtagatatggatcgggtacaatctgcttcaatggtacagtttgatataggcagtcccgtagaagtgatggtgaaaaagaacaatggcaccattcaggatgtgaaaatccgtccgttagcaataggtatacaacatacggtaaaccacaatgctatcttttttacactcactagacctcaatgcctgtcgattgagtttaacggtgatcgtttgcataatcttcatttgtttgctaatcctttggaaacagaaacttatactgaaagcagtgacaaagtaatgtatttcggaccgggtgtccatcgtccgaaagatttgccgaatacacagatacagattccttccaatactactgtttatttagctcccggagctgttgtaaaagctaaattattgattgacaaagctgaaaatgtacgcattgtcgggcgtggtattctcgaccatccgatccgtggaatagaagttactcattctaaaaatatatggattgacggtattacagttataaatccagatcactatacagtatttggtggtgagtctacagggttgaccatcaataatttaaagtcttttagttgtaaaggatggagtgatggcatagatctgatgtgttgcagtgacgtattaatagacaatgtttttatgcggaacagtgatgattgtattgccatctatgcccatcgctggaactattacggaggaagtcgtaacgtgactttacagaattcaatcctttgggcggatattgctcatccgatcaacattggaggacacggtaacccggacgataaggttggagagattcttgagaatataactgtccgtaatgtcgatattctggaacatgatgaagatgatcttctttatcagggctgtatggcagtggattgcggtgataaaaacttggtacgcaaagtattatttgaggatatccgtgtagagaatatccaggagggaagattgtttcatattaatgttcgtttcaattcaaagtatgataagcaacccggccggggaattgaagatattatttttcggaatatcatttataatggagtaggggagaatccatctctattgaaagggtttgataaagaacgttccgtcaagaatatcatcttcgataatgtgattatcaacggcatgaagatgaaaaatatagatgattttatcacgaatgaatacataaagaatatcacagtcaaatagcataatctggtatatgaagtatgaatggaaaaatctctttgtattaggtgcaaacttcttttcttctaatatcaaactttctttaggttaaacataaactataaatgcaagtttcatttatataattagaacttgcaattatataaatgaaactttcgtttttataatcaaagcttgcaattatagatttctattagataagagtaactttagtattagaaggaaagaactttgcaataggaagataataacttatctattaatagatgagagcaaagctgcactggaatcagaattaaggagtctggaagagaaccatgagtataaatacaagagttttattcccgggtttatgctaatcaaagtaaatgtttcattcactttgaactcctttttattactaaatactatctttgcttatcacttgtataaaaaacgaatcgcactatgattaacaaaattatatggattattgggattgtatggattgggaatattcaaaatggagtgcaagcgcaacgacgtaactttatccatcccggaatcacctatacccaaggtgatttagaccggatgaaagctatggtcaaggcgaaacatgagccttattattctacttttctgaaattaaaggaatctccctattcttcactcaatacgcaagttatcaatcggggaaaacaaatcagagaaggacgttttaatgctactatcggagtagatggcaggcgggcacatgacttagcattgctttggcatctgacgggcgatgaggcttatgcccgtaaagcggtcgaatatctgaatgctaattcttattataccaatacaagtagtcgtggaacaggaccattagataacggaaagatttaccttttaattgatgccgccgaattaatgcgtgattattccggttggaaagtagaagaccagcaacgttttaaaaatatgttggtctatcctggatatagcaatacggaagatttctcttccaaatatgcaaattactgggatgattcaaagaacggagttacattctattggaatatttttaatttcgatgccgcaaggtttggtaatcaaggacttttcgctgctcgtggaatgatggcaatgggtatttacttagataacgaagtaatgtatgaccgtgcttaccgttatttattgggaatgaagcatcgaccggatgatttaccttatccttcaggaccgacggtcactagcaaagaaccgattaagaaatcaccaaccatgcttgattataaattggaaggaagagaaaacaagatttcagattatggatacgatgaacagctacagtattatatctatccaaacggtcaatgtcaggagtcgagtcgcgaccagggacatgtattggcaggtatccacaattatgtagctatcgcagaaatggcatggaatcagggagattctttgtataattgtctcaataaccgtttgcttcttggtttggaatggaactatcgttataacctctctaaagtccagacctatgaagagcaaaaagagccttgggaaccgacaagttatagtaagaattcaaatgaagttacctttgagaacggaaaatttctccagataaaaagccgtagtggacgttgggaatccgtagccgtatctcctcacggacgtggagacgtagcaggtagtggcggaactcgtgaaatggcattggcgcattatgcagtacgtgctggattgccggagaacaactatacctggttgaaacgttaccgtgattatatgatagaacatcacggttgcgaaaactgggggatagcacccaactggttttatgaatggactggctggggaacattgaccaagcgattgactccctggatggcaggcgatcccgtttctttctctacgggaaagcgtgtatcaggaattcatttgctaccttgtgaaatatcggctgccgattacgattattattgtcttgcggaagatcccgaagggcatacctatcacaatgtaggaaagaaacgtggcaacgaatacagacctgacggagcagtagagctacgaaaagaagaagataattacgtcgttacccaaatagaagatggagaatggatgaattatactgtaagtattcctaccgatggagattataccgtttatcttgtttatcaatcaaaaggaaattctttattgtccgtagcctctgattcagaagtaaagacagaacccatgcaattacccagttctatacaatggacggaaagagaaataggaaaactcactcttcccgcaggagcttgtgtacttcgtttacagatagagcaagccggagataaactcgaaattcagaaaataatagtaaagcaggataaggggatttgattcttcgttcgtacttaataatagtactacaaaaaaagatggccatgaaaattcgaatatgtttgttaatcatactaatgggattattgtatccgggttatattagctcgcaagaatccccttatgtattccgccagattggagttgtcgaaggattaccggataactatgtaaaaagcgttttccccattcccgacggacgtatcggtgtgcgaagtactgtgttattaagcctgtatgacggtgcgaactattcaaatttccctttcaatattcatggcgaatattcgatagcatataaccatattattcccgaacaatatattgatgccgacaaacgtttgtggatgaaagaacgcaagagcctacgcgtcttcgatttgactaccgaacagtacatctataacgtagattctttatttcaacaattcggcttaaaggataaagtggcggacctgattattgattcagagaaacattgttggtttctgacgccgggttcctctgtctatatgtacgatgcagagacaaaatcaatcgaacaggtttgtaggaatgatgagtttatggaatactatggaggattactcggagtagaaagtcatggaaaatacagttggatggttcatcagaaaggggctatccgttgctacgatttagaaaagaaacgtttcgtgcatcaacttgatttcctgaaagaccaactgaaaccggatgaccgtgtggttttgaagatactcgataatggtgacttttggttgatgtgggatcgtggagtaggctattatgatgtctataataaaaaatggaaccaaatttcaggtatccaactcggacactattcatggtttacttctatggatgtggataaaggtggaaatgcatgggtaggaaccgttattgatggattctatgtcattgatatgcacaatttctctgtaacccggacactggatattcctttattattaggtaatacagtacgaaacggtattcaaagcatctattgcgaccgggaaaataattccgtttggataggactttataatcagggaatgtgttattatcatcccagcatgaataaaatagtgctgtacaataagaagatgataaatggcgactggaaaggagaggaaatccgttgtatgctcgaaacatctagaggagaaattctgatgggtactacgcagggtgtctatcgctatgaaccggagactaaaagcatgaacagattctatcatgaattcagtcagaagaattgccgtgtactttatgaggacagcaagaagcgtgtttgggtcggaacataccacgatgggctctactgcatagatcatggaaaggtacaatcttacgattatcccgatacggattatcagaatgaattggatttcagtaatatccgtgtcatggtcgaagattcttccggtcgattgtgggtaagtatatatggtggtgtaggattattcaatcctgaaaacgggcaaataaacttattgtccgaacagtttcccgaactcaaaaaatataaagtagcgaatgcattggccatagataatcgatcccggttggtcgtaggcagtgataatggactctacatttacgatcctgcaacgaataaaatatggataccggaggaagacgggcaggctaattctattttcaatcagggaagtatcaagtataatcagatcctcaaagaccatgagggaactttatggtttgctacacaatatggcttgagcgttttgacttacaatgggcaaagctacacattagggaaagaagaaggtctgtctaaagctatcctgaacgtagtggaagataagaaccatgatatatggatttcgacagtcacttctatttataagataaaagtagacagaagagcagataaatacagttttcatgtaatcagctgtctgtcggaagatgaaatccgtcaggatgatttatatagtttcccttcgttaatgaccagggacaatcagcttttcctggggctgatgaacggctttatcgctttctcaccagaaaacatgatagataatcagtgcctcaatcgtcctctgtttacttcattccgcttgtttaatgttccggttgtttcgggcgaagcatataacggacgtgtcttatttgataaagcattaagttattcggacgaagtacaattaaaatatgatgagaactatatcacacttgagttttctggtctgaacttccctaatccttctcaaacctctttccgttaccaactggaaggatttgacaaagaatggacggaaaccctttttgagaatggacaaggacgtgtggtctataataatctcccttcgggcgaatacattttccgtgtgtccgctgccggaaacgaccggatatggggaccggagtctgcattcaaaattgtcattcatcccccgttctgggatacactggccgctcgtattttctatgcaattttagttattctcttaatcttcgggttgatctacgtaataaaccgccgcaaccggcagaagatgattcgtatgcaagaagaggaagcgttgaagcagaaagaagaactggatcagatgaaattccgcttcttcacaaatataagccatgaactccgcactccgctgacattgattatcacgccattagacatggtgatacgtcgattgacagacgatgcgatgaaaaaacaactgaataccatctataagaatgctcaaaacctattgtcattggtgaatcagctactcgatttccgcaaactggaaatgaaaggagagaggttgcatctgatgaacggcgatatggaggaatttattgtttctgcctataacaacttcatgccaatggcagtagagaagcaccttaactttgtgaaccaatctgaacatagagcgctttatatgttcttcgaccgggataaggtacataagattgtgaataatcttttgtccaatgccttcaaatatacgccggaaggcgggacggtagacttactgcttgcaacagaagaaatagaaggaagaaactacgtgagaatatccgtatcggacactggaatcggaatatccgaatcagaccttccttatatcttcgaccgtttctatcaggtaggaaatgaaggagacgaaaaaataggtagtggcatcggacttcatttggtaagggaatatgtaaatatacatggtggccgtattaaagtggacagccggatagatcgtggatcagtattcaccgtttggttgccgatggacctgaaaccggaaccgaacgaactgccggaagaaatcatcggaacggaaacaccagacattaaagagaaagaaaccactacatctacagtcgatgataacctgaagaaactgttgttagtggaggacaatcaggaattccgtactttcctgaaagaacagttagaagatttttatcaaatcattgaagcggcagacggcgaggaaggagagcgaaaagcgatagaggaaaatccgaacctgattatcagcgatattatgatgccgaaagtagacggtatcgaactttgccgtcggatcaagacgaacgtgcagacttcccatatacctgtgatattattgacagcccgtactgccgatgatatcaagattaacagctatgaagtaggagcagactcttatatgtcgaaacctttcaactttgatatgctgatggtacgcattgaaaagctgatagagcagcaggaaaagagaaaacaggaattccgtaaaaacatagaagtaaatccgagtgctatcaccattacttcagtagacgaacagctcatacagaagtgtctggaatacatagaaaagaacatggacaatccggaatatggcgtagaagaattgagtggcgatttgggtatggtgcgtatgagcctttaccgcaagctgcaatccatcaccggacacacaccgacagactttattcgcagcatccgtttgaaacgggcggcacaattattacaaggaagtcagttgccgattgttgaaatagcgaaccgggtaggattcagttcacccagctatttctcgaagtgttttagagaaatgttcgggatgcttcccaagcaatatgccgaggaatcgggaagaaaagaatgacattgtgtttgtgtttgtagtttaattattacatttgcgctcaataagtgagataattgtaagatcttgttcacattggagcagaaaaagttttattttataatatatgttgatatgaaagtattagttttaatttcattggtaggaggtttgatgttatcctcttgcggaggtagcagttcaaaaaataatgcaaatgttaaggaggtaaatcctgcagataccatctatttgggagacttacgtgaaaaatttgcaaatgatagtgttttctttaaaatagtggcaccggatttgatgttgatggattatcagtatctttgggcagtaacagaatcggaagcagtagagaaaggactgacaaaagaatactataaacgtgtgaagaaagaaatcagcgatacgaatgaagcgatcaaaagaggtgtgatgaaaggtgcgaacgtaaaacgtataccggatttccaggcatcacaggaaaataaataatgaatccttccggatgaaagctttcatccatgcaaatataagaacaggggagtcgtcaaatgtaacgacatccccttttttattggtgtaacggttagatttatcccgatgaaatgggaagtttttgcaaaaatacacgcttgttacgatagttttgttatctgttacttttgtggtatttgaatttgaaacttgttcctacttttgtatcatcgttaaacggataaatttaatgccatgaataaacagcaagctacatttgacgacttcttctctgaatgctatcttaaatataaggagtatatcaagaactatatcgctatccgcatttgccatccgcatgaagcggaagatttggcacaggatgtctttgtccgcttatgggaacacagggcattcgtgaacaaagatacagtctggtctttgctttttaccatcgctcgcaatatagtaaccgataaaatccgtcgttattataaacaggaagatttcgtcgcctacatatataataggatggaagacaccagtcggaataccacagaagataccattcattttcgtgaactaaagaagatgcatgaccaggttatggaagctcttcctgttaaacgccgtcagatttatgaacttagtttcaatcatgaactctcttgtcctgccattgcaggaaagctgtccttatctccccgtacagtagaatgtcaattattactggctcgtaaaacggttcgtacttatttgaaaaatgaattctccaaagtcggttaaataccagattcggaaaaacacatattaactttaacaatttaatagtattatggaaattaaatccaaattcttatgttcaaaaggagtcgcattggctttcgccatgctgctgggtggttcgcccggtgtattgctctatgcaaatgattctgtagaagagagtttgatggtagtccagacgggccgcatcatcaaaggacttgtgacagatgcgaatggtgaaccactgattggttgtaatgtagtggtcataggaagcaatgcaggagtaattaccgatattgacggtcggtttacgctgaatattcctgctgatgccaaacagataaaagttagctatatcggatatgtagatcagattattaaccttcatggccgctctgattttaaagtggtattaaaggaagataataatgcactggacgaggttgttgtagtgggttatggcacgcagaaaaaagcgacgttgacaggggcggtagaacaaattggtagccaggtattggaaagtcgtgccattaccaatgtcggtgctgctctgcaaggagccactccgggtttggtagtcactcgttcttcctcacgtccgggtaatgaaggtttaaatttccagattcgtggtctgacatctgtcaatggcggtagtccgttgattattgtggatggagtacccgtattgaattcagagtcattccaaaatctaaactcggatgatattgagaatattagtgtattgaaagacggttcagcttccatttatggggcgaaagcagctaatggcgttatcttggttactaccaaaaaaggtaaaggcaagacaacggttgattatggcttcaatatgcgtttcactaccaatggtattatggctttctctcccagtatgcaggaatatgcttccatgtggctggaagccaataaagaaatgccggaacatgactggtggggctggggagaagaaaacctgaagaagatggctcaaggcattgaaggtatttatgagtcgactgtagccgattggggtacgatgttcgttggtaatgccaatcgcctggatgaattgtttgcccgccgttattcttaccagcataacttgagtgtagcaggttctacggataaatccgattaccgcatttcattagcttatgctgataaccaggctaatctggctacagcctatgacggacagaaacagttgaacttgcgcttaaactacggcatcaaattgactgattggttcaaactggagactttagccagtatgattaaaacaaataccgaaacacccacacatggtatcgaccgtacactttacggaaacgatgctccgtttttcccggcaaaaaatccctatggacaatggtacgctaacttcggtaatgtaggtgatcgcaatgcggcagcagctacaacggatggtggacgtgacgagagagagaagttgactactcgtgtcgattttaaagcattggtggatatttggaaaggaatcactttcgagggtactgcttcatttcaaaatgaggaatatcgcagagaacgctattcgcttccggtacagtgttacaattggttcggcgagcagacggcgaagttagtatatgaaacaacacaaacccttagtactccacaagatgtgatgaattttaaagactcccatcagccgggatatttggtacaggcaaataatgcccggtatcagtactattcagggttattgaaatataagcgtacatttgccgaagtacataatatagatgctatgttcggcatcaatgccgagaaatgggtgactaagaaagttgttaccgcccgtgagaagtttgaggatgccggaatttacgatttgaatttggctacgggtacacagggtaacggtggaggaaagactcataatggtacctattcatatattgcccgtttgaattataactatgcggaaaaatatatggttgaattgatggggcgtcgtgacggaaattccaagtttgctcccggttatcgttttaagagcttcggttccgtttctttgggctgggcgttctcggaagaacaatttgtagaatttctaaagccagttctttcttttggtaagctgcgtttaagttatggtagctcaggtaatgatgttgggctgggcgattacgattatgtatctactgtttctcttgggacggccggttttggaactatacctgccaaccaggtatcttcaggttttggcggtttaatttcttatgaccgtacttgggagaaagtttcacaaaaaaacttcggtatcgatcttaactttttcgataatcgtttgaaagctacattcgattattttataaaagataataccggtatgttagtgaatgtcacctatccgggcgtattaggaggtaaatctcctaaaacgaatagtggtcatttgaatgtaaaaggttgggaattcactattggatggcgcgatcagattaaagacttttcttactatgccaactttaatattggtgatacaaagagtctgttgaaagagatggaaggagcagattcttatggggctggttggaatgcagctgtgaatgggtatccattgaattcgtacttcctttatcgcacagatggttactttaaagatcaggcagaagtagaccgctattatgcactctatggagagggtaaagaagatttgactggtgtaggagcaggaagtgcaagccggttgcgtccaggtgataccaaacgtttggatttgaatggtgattataagatttccggtgcagggaatgaaaatagcgatttgcaatatctcggtgactccaatccacattttgttttcggtttcacactgggaggatcatggaaaggtattgatgtgaacgcaatgttccaaggtgtcggcaagcagtatgttatccgtaatgactggatggcttatccttttcaaacacgtactgccaatcagaacccgacatatttgggaaagacatggacagagagcaatccgaatgctgaattccctcgcttgactaccaatgcgaatctcgcacgctggaattatcagaataacgactttatgatgcagaataaccgctatatccgtttgaaaacattaatagtcggctacacattgccgcagatatggacgcgcaaggtgaaactggaaaaagtgcgtgtttacttctctggtaatgatttatgggaagctaccagtattcgagacggtttcgacccggaaatgggagcagcctccaacaacagtggatacccgtttgcacgtacttggtcgttcggtctgaacatcactttatagtagctatggaaaattaaatacagaatagaagatatgaaaaagataacgaactatatattaatttgcacctgcgcattgggattttcttcatgcgtgaatacgttccttgacttggaaccactggatgccaagacagatgtgatttatttcaaaactccggagcatttccgtgaatatgctaacgggctttacgggcaattattgggatggcagtcttcctatggaagtatattcgatcacatggatgcggcatctgatctttctacttgtttcagatattcgtatggtgtggggaccggtgtgatgggagttcctaatgacgatagccgttggggtaattgctatggtaatattcgtgccactaatcacatgtttgaaagagcagtttcttcctatacaggtaatttagcggatattaaaaaagaattagccgaaggtcattttttccgtgcctataactatttttacttattgaagttttttggtggagtgcctgtcgttacgaaagttctcgacgtgacttcaccggagttatatggaaaacgtaacagccgttatgaggttgtcaacttgattctctccgatttggatgaggctattgcagggttgccgttggaacagaatataacctctgccgacaaaggtaaaatcagcaaacaggctgcacaggcatttaaggctcgcgtgttactttatgaagctacctggcgtaagtacaatggtacttctactgattttgaaggttctgccggtccggcttccgatcaggtaaatgctttcctggaagaatctgttcaactatccgaaacagtgatgggggatgctgcttattctctttggaattataataatgtggcagcaatgaaaaatttgagcaatcgttacctgtttaatattgaagaagaagctagcaatcctgccggtgcaggaagagcgacgaacaaggaatttatcatcgcttctgtatatagtcaggaaacgcgtaaaggacaggttgatttgaatcaggtgatttatacggatatgcgtcccagccggaaattgattgatatgtttttatgcactgacgggcttccggtcagtatgtctgataagttccagggatataagaatccgggggacgaatttcagaatcgggatttccgtttgacttcttatgtaggttcatatgctacgagcctgacagttgagaactgtgggtatggtgtttccaagtttgctattactgatattcaacgccaaagtaaagatgaatcggccaattatccggtacttcggttggcagaagtatacttgaattatgctgaagctgtgatggaacgctatggtgaaatatcagatgaccagttgaataagtcgataaataaaatccgtgcccgtgcgggaattgccaacctaacaaatgcattggcaaagcgaattcaggaaggagtgccggcaaatgcgagtaagacagtcaatcaggtaatgctggatgagatccgccgtgaacgtgccttggaactctatatggaaggtttccgttgtgacgacctgaaacgttggggtattgcggagaagaatctgaatgagtctcgttgcggtgcggtagtaggtaatgccagctatccgacggcatttatagacgaaaacgggaatgctaccagtgctttcaatccggctatctttacgaaggggacggaagaagtggaaacaggtaaaggcaaattaccttgtgtagtgcttctcaaatcatccgactgcgcatttactaagggagattatttgtgggcgattccaagaaatcaaatcaacctaaattcaaatctggtacaaaatccgggatattaatcattcaatcgtttaacgtataataccatagattatatgaagtttttattcaaatatacatttcacttggcaatacttgcttgtgtttccgcacttttctccggttgtgagcaagaccccaagtatagagtttatgattatcctgtaccagtagtggagagtatttatcctacggacggatatgtcactacacaggtagttattacgggaaccaattttggtgaccgtgctgaagcagtgaaagttttcttcggtgaagcccaatccaataaagtgctcgattgcaaaaataaccgtttggtagtggaagtgccggaaactgcagtaacaggcaatctgtctttacagatttataataaaaaggtggagaatatcggtcattatacagtactgcctacgccacgtgtcattacagtgacttctgatagtgaagacggtgaaggggtagccgatacgggagacaaggtcactataacaggtgagaactttggtacggatccatctgatatttctgttagtttcaatggaacgccggccgaatttgagctggtggatgagtctactattgttgcgacaactcctgctgattataagacaggtaatgtgactgtaactattcatggatatacaatgacaggtagtgcaatgtttaatcctaactcaaagggtgatgtaacagtgctttaccttcaaaactacaagcagccgtttgccaaggcaaatgatgaaaactggaagaatggtgaatggtggactccggcagtgtggaatcagaataaggcatctttcaatgcaaaaaacaatactactgttaccggaatgcagtataaagcagcagagggcttcacattagcgttccagaatggatgggataaagaagcttatacgaatgggaaaatatggcaagttgctacacttcgtcctggtaaatacagactggaagttacttatgcctatacgatggtagtaagtgatgtggggaattttatttctgcattgatggctaaaggaaatagtgagagtgatataccgaatgtagctgatattgagcaattaaatggagtttgtgcgatctatgacaaagctggaacaaatgatgactcgggtattttggtaacaccttcatttgaagtgacggagacaacggatgttgtcattggattcctgacttctctggctaaaggtaattcatactttaaggtgacagaattgaaattgattcttgaatgatgtggaaaaagaaaaaagagtaattcatcgtgataatataattaagattatgaagaaaatatataactatctgtttcccgtttttctctcgcttttcgcattagctgcttgtgacgaggataacgaagaaattgtttcaatgagttacactgatcctgtggcgactgtaacaaagatagatcccgtagaaggatatgttgggaatgagtttaccgtaagtggcagtgattttggtatcataacagaagatgtgaaagtatttatcggttctcaggaggcagtagtagtctcctgcgccgatgatgctatccttgcgaaagtgccggaatcggcaacaaacggaaagataaccgttgaggttttcgggcaacgtgtggagactgatctagtttatcgtgtacttggtaagccgggtgtcagcgtagtgaaaccttcttatggttttccgggtgccagtctcgtttttgaaggacaagaatttgtttcttctaaaacactgtatactttgactttcgggacttccacagacaaggcagagattgtgggtacacctactgataccgaatttacggccaaagttcccgagacagctgtcagtggagttatgacacttattatggcagaacaaacgattgatttggcttcttatcctttcactgtgttgaagcatgcaacgcttgatactcctaaggaagacgaaccggttccatcaggttttgctggcagtaaatttgcaataacaggaaccaatcttgtgcaagaattgctggataagtctgttgaagggttggagcctttgaaagtaactttctttaaagctggcggagaacctgtagaagctgcaatagatacagataatttgacggataagagtattccactcactgtacctgcttcgttggaagccggagattatacaattactgtcattactccgtttgaaactatcgggacacagttgaaatatacggtattaccgatgccgacagtaacaggcatttcaacgaaagccggatatattaatgcggaagtaacgatcattggtcagaactttggtacgaaagctgaaaatattcaggtctttttcggagaaacagtttgtgataaagtgacactgaatgataaaggtaatatcgtagtgaatgttcccaaaggagtttcatctgaagctccggtgaagattaaactgataattcagggtaaggaaatagagatgggcgaatcaggcacatttgaggtttgggcaactccggaaatcacttctgttgaaacactgtatatttatccttatggtacattagtaaaagccggacaggaaataacatttacaggaaaaggttttggaacggataagaattctgttacagttacttttgagggaatatccgtacccgttacggttaaagagattactacgacttctattactgtaacggttccgcaaggtttcaatggtggaaaagtaacaatggtgtttgaaggtattgcacaacccgtagagagtgatatattgcaacctctaccggtggatggagatatttctcaatatgtactcatgaactataaacagccttttgaatatgtaaaagaaggtggagataaaggattccataaaaaaggagagtgggcaaaagctgcttattggatagttcagaactctaacttgactgctggtgaaggaggtgctgctgttgatttggcatttaaaacgaaatatggtgatggaagtgatgcaggtttggctttacaaacagattggggatttgacaatcctaaaaatgatggtaaggtatatcagacttctcatcttcaaaaaggaaaatataagttgacggcacacgtttatgaatatgacggcagaggttttaccggttatgttgcggtttgtaaaggtaacgagatggcaaatacgagtgatataccaagtaagagtctggcaaacgcttctatttcgggtacgggtgatgtagtagttgatattcttgttgaagagcctaccgatgttgtcattggttttgtatgtacgattacagtaaaacaaggacgggctaagatagataatttcaaattagagttagtagagcaataaactataattgggtgcaccgtaatcaatggtagatatggtgtaccattaaaccaaaaatatgatgaaaaagatatattatataaccgcagtatttgctaccctgtttttggtaggatgtggggacggcattgaccttccgggtgtcaatgtggaaactgatttgaataaaattcctcttcctgataataacgtaaatttggaacaagttgaacttaaaccgtcaacggaacccatgctgcatgaagggttgcatacggaggaagacttccagcgtatccgggataaaaaagcagccggagaagagccttgggttagcgcttatcaattattagtagaaagccagttttcgcagaagacggcagatacttatcctacggaatggattaaacgtggagtttccggtgatgaaaattatatgaatgcagccagaggggccactattgcatatcagcaggcgcttcgttggaagattgaacaagatgatgaatatgcggcaaaagcagtggagaatctgaataagtgggtacagacttgtgtaggtgtaacaggtaatacgaatttatcgcttgctgcaggactttatggttatgaatttgctattgccggtgaattattgagggattatggaggatgggatcgtgcggacttcgcagctttccagaattggttgcttaaagtgttttatcctgctaatgatgattttctgaaacgtcatcacgatacgaatgcgttacattattgggctaactggtgtctttgtaatatagcggctaaaatggctatcggcattgtaaccgatcgtcgtgatatttataatgaaggtattgcccatttgcagacaggtgatacaaacggacgtttacgtcgtgctatctatcacgattatgcaccggactataactttgctcaatggcaggaaagtggccgtgaccagggacatacattgatgtgtgttggattgatgggaattatctgtcagttggcatggagccagggagacgatttctttgcttatgatgataatctcttcctacgggcctgcgaatatgccgcttgttgtaattacactaatgagactgtaccatatactacttatatatggcaaaaacagagtcaatggggatatccgattccggaagaacaaacaacacttggtggcggtaaatggatcaaacgtgcgatatgggcgttgccttactatcattacaaaggggtaaaagacatctcggatgataatctcaaatatactaagatagctacggaatatgtaggaatagaaggaggaggtgggtattatgacgctaactccggtggctatgacgtacttgggctcggtacgctgatgtatgcaagataaaatgaataaaatgtgttagacttcgccacagattcggatatgccagtgtggatggattatttgtttcaatctgtggtgaattccaggacattaacggtattagtaaaaacttgaaatgaataaactaataagaatagcgctcacatttttacttgtaatgaccacaggagtcatacaagcagaaatagtcatctatccggtacctcaaggcatctattatgcccgtcacaatgatgactatacggtaaaagtacggcaagtgggagaaaaagactgggtagacctttatgagtataacgtaaaggtggatatggatacgaagtccgatgccacgatggttcagttcgacttttcagggaaagtggaagtattggtacaaaagaacaatggggagatccgttcggcagtggtgcgtcctttatccaaaggtatccaaccggagattgatggtaactttttattgtttacgatagataaaccacaaaagttgtcggtcgagtttaatggagatcgcctgaataatttgcatgtatttgccaatcctatcatcaaaaatgtgccggataagaatgatccgaacgtgatttattttgaagctggaatacatgaaccgactgatacggctggaaaatgcttccgtattcccagtaatacgacggtttatttagaaggtggtgccgttttgaaaggttgtctcacttgcgacagtgtagagaatgtgaaaatattgggacatggcatgttgcttgaaccgcaacagggaatttcggttacttactcccggaatgtactgattgatggagttacggtggtaaatccacggcattatactgtctctgggggacaatctaccggaattactatcaaaaatctgaaatcattcagctatcagggttggagtgatgggctggattttatgtcctgctcggatgtgatgattgatgatgtgtttcttcgtaattcggatgattgtatagctctttatacgcatcgttggaattattatggcgactgtcgcaatattcatgtacttaattctactctatgggcagatattgcgcatcctatcaatatcggtacacatggaaatacggaaacgggagatgaagttttggaagatatagtattcaggaatattgatatattggagcatgatgaggatgatcgtgattaccaaggctgtatgactatcaatgtaggggatcacaacctagcacaaaacattacttttgaggacattcgtgtggaacatattcaggaaggacagttatttcatcttcgggtgatgtataaccaaaaatacaatacaggtcccggcagaggtgtcaagaacataacattccgtaatatttcatgtaccgggaaatatatcaattcttctttaatagaaggttatgataaaaataggaagattgagaatattttgttcgaaaacattgtgttgaacggtaggcggatcacttctttggaagaattgaatatagataaaaaagattttgtagagaagatacggataaagtagctaataactaaaagatgaaagatgcgacaaaaaacagtttttcgtgctttttgccgcatctattttatagaaagaggaataaacttatcgtaaaggagtgaatgaacctatataaatgcgttctattttcagggaggtggcatttattccgaataggtcggtcacatctgatttataatcttcagtcacatcttccactaaccaataaggaatcgggccaaggtctcgtgtggtgatactctttgaagtatcggaacgttcgggaagtttaaatttgcagtcatactctttaccattgattgtaatttggaatgtagtgcctgactctgatgtggagcgggagaagcttccttctattttcggagcattatctttactagtaacaattgtcactttaccactacttttttggtcataagagaaagctattcctcctgtagcttgtatacccgcttcatcctttatcttttttttgaccgcttctagtttttctttttgttgttcatccaacagactttcatctattcctgtgattcttgcttccacggaattcactgaaaaagattgtttgccgttgacgacctttagccctatttttatgattcttccatcagcgtcttttaccatcaatgacgtgctgcccagttttatagagctgatctgaatatcattgttttcgtccacataagctgtagcaatttgcccatcggctatttctgctgtataaggagctacgccacctttaattcccaactttgttcctcccgtgattgacaaactggtttcactgataggaggttccgggtcgaacatcacttcccaatattcatataggtaaaaagcatcagcttcgtcgctgcatgaataaaatacaggaagggagcataatagaataaatagtagacagagcttcgccatttttgctttcataatattcttcttttttatttcttcacaaaagtaaagctcctttcctgtatttcaaagtatattgatgaaaaataagattaaaactctatcttatgttgtttctcatcatccaccacagccatcattccttctacctgtgctaaagccagcatacgtccgtggaaagaataaccggcattgtagcctttatcctcatctccgagcatcattcgtccatgatctacgcgcatgggaagtcctggattctctttctcgaaaatgcggatgagatcaatcagatgtcctcttcctgatagatgagaactttcgatgaagtttccacccggcatggtctctgtactgcgtagatgaacgaaatgggttcttcctgcaaacttctttgccaattcacgagtatcattatgtgcgcctgcgctaagagaacctgcacagaaagtcagcccattatgcggattgtctacggcattcaggaaccaggctatatcttcttcattggtgacaatacggggtaggccgagaacctggaatggaggatcatccgggtgtacgcacatgttgataccatattcatcgcatacaggcataattgcagaaaggaagtaacacatattctctcgtaaagcgtcccggtctatgtctttatataaacctaacagacgtttgaatatagcaaccgggtttttatctccttctttgatattaccgttcacaaatccttgtgtcttgacgataatagtatcaatcaaatcatccttttcggtctctgtaatcactttgtccagttcggcaactttatgcagttcttcttctgtatagtctttttcagctccttcacgttctagtattttgatgtcgaagtaagcgaaacgaatacggtcgtagtaaagcgaactggtaccgtccggccaagggtactgtaaatccgtacgtatccagtcgattaccggcataaagttgtaacagactgttttcactccgcatttacccaggttggcaagacttactttataattttcaatcaactgttcacgttccgtacccgcatacttgattgcctcacaaaccggaaggctttccacgaccgaccagcgcaacccatacgattcaatatacgattttaaatcgttgatggcttctactgtccaaatctctccgttcggtacctcgtgtaatgcagtgacgattccttcaacacctatctgacggagcatcggcaaggtgattttatctttcttgccgaaccatctccatgttttttccatcatagcgtttgaataaattaaaagattaaatattaaacgccgctgaatgcactgaaaccaccatcgataggcaacatagctcccgttacgaaactagcggcttcactacacaggaattgtacagcaccattcaattctttgatgtcgccgaaacgattcatcggagttttggctaacacctttttacttctgtcggtcaatgaaccatccgggttgataagtacacgacggttttggtcaccgataaagaatcccggagcgatagcattaacacggataccatcaccgtatttcagtgccatttcgcttgccagccattgggtgaagttggctactgcagttttagcggccgagtaacccggtacacgggtgatagcactataagcagccatagaagatacattgatgatgcatcctttcttctgttttgccattaccttaccgaatatcatagacggatagactgtcccattcatattcaggttagtcactttttcccagcaagagatgtccatatcatagaagtgctgatccggttcgagagtggctcccggcatattgccaccggcaatgttcaatagaatatcgatctttccccatttggctacaacttcttcggctactttctccaggctggcgatgtcaagtacattaccaatgatgccgattacatcgttaccatattgcttaagttcagctacgcggttgtccagttgctcctgacgaatgtcaatagctacaacttttgctccctgctgtacaaagtgttgggcaatatttccgcccagtacaccacctgctccggtaataacagcaactttaccggcaatactaaataattcgttcatggtttctatcaaatgtttttatgaatggatgcaaaaatagcgggtttttatacatgctatgatgcgtatttttgcaagatatttacctatctttgcaaaagcagtttagaaaggagatttatgaagaagataatgaatgagaagttgactattacgacttctaatcccgtccgtgcccgcttttatgaatatccacgtttcacgtatccgtggcattttcatagtgagtatgaaattatttatgtggaaaagggagagggggattgtctggtgggtgacagcattatctcctattcaaaaggtgatttgattctttttggttccgaactgcctcatagtatgcaaagtccaccggacggcggggaagaatctgataacgaagaaaaaaccgaaccgaaagtaagaggagtcaatattcagtttgagaaagattttatgcattattctatttctcaatactcccagtttattcctatcaggaatttattggaggatgcttgcagagggattaaattcacaattacccgttcggggaaaatcattaaattattggagcaaattccttctgccaaaggagcagatcaaatcatcctgttgctttcacttctacagatgatggctactagcaatcataagaaatatctgactacttctcattatactccgtccccttcgattatgcgtaatgaaagaatggaaaaggtgattgcctatttgaataaacattataccgagtctatcggtctggatgaaattgcttcttatacagcgatgaaccctgctgctttctgccgatactttaaagaaaacacaggaaaaacattcaaagagtatgtacttgatatgcgtatcggatatgcttgtaaactattgaatagtagtatgatgaatatatctcaaatcagtgctacttgcggatttgaatcacctgtacattttaaccgcatttttaaaagggtgacaggaatgacacctactttatatagagagcagatggaataagcttttcaggcaataaacatttgagtataatttcttcctcgttcgtatataatagaaaagatgaataaacatgagcgtaaatagaatgaagaaaagaattttacttttgttgttggtgataccggcattgataaaagcgcaagatgtgatgacagaaacccgtcaggaactgacgtctcccgacggagcttatcgttttaccttttatcagcgtgcggtaggagaggataatacacaaatgtattataccttgacttataagaatcgtccggtgattgaagaaagtaaactgggtgttctgattgaaaatcagttatttgaatcggcgttgggtataccgaatgatacttgtcatttttggtgtgagaatctgaagttgacagagactgaacatcaaaagacggacgagagatggaagcctgtatatggcgaacgtgcggaagtacgtgattgctacaatgagatgactttgaaattcaagaagggagaaggaaaaggtaatcgggatggtggttatgataagcgtaaaaactactttatccttaattccgcaacactattataaattaaactttttaagtacctgagcaacaaaaagttgctcaggattttgccatgtcagaattttcacttatcttagtgttgcaaaaaaaacaagagaatccgacgatagacatggcgaagatacaaattaaatctgagagactcactccttttgggggattattttcaatcatggagcaatttgactccacattatcatctgtaatcgactcaaccctcggtctaaggtgtagatcgttcggttatcagtacagcgaaatcatccgttctctcatgagtatctacttctgtagcggttcatgtattgaggatgtcactactcatttgatgaaccacctctcgcttcatccgacacttcgcacttgtagctctgatactatcctcagggcgataaaggagttgacgcaagaaaacatttcatacacatcagatatgggcaagacctacgatttcaatacggctgacactctcaatactttattgctcaattgtatatttgcatctggccaactgaaagagggtgagatgtatgatgttgatttcgaccatcagttcatagagacagagaagtatgatgcaaagcctacatacaagaagttccttggttatcgccctggcgtggcggttattggcgatttgatagtcggtatagagaatagcgatggtaacacaaatgttcgtttccatcagaaggacacgctgaagaggttctttgcgagatttgaacagaatgggctcactatcaatcgcttcagagctgattgtggatcatgttccgaggaaatcgtggaggaaatagaaaaacactgcaagtccttctatatccgtgctaaccgctgcagttcgatctacaatgacacctttgctctcaaaggctggaaaactgaggaaatcaatggcattgagtttgaattgaactctatccttgttgagaagtggaaaggtaaggcatatcgacttgtgattcaaagacagaaacggatggatggtgtgcaggatttttgggaaggagaatacacataccgttgtatcctgactaacgactatgattcttccgtaagagaaattgtcgagttctataaccttcgtggaggaaaggaacgtatcttcgatgatatgaacaatggtttcgggtgggacagattgcccaaatccttcatggcagagaacacagtgttccttcttcttacagcacttatccgtaacttttacaaggccattattcaaagacttgacgtaaagaagttcgggctcaatgcaacaagtcgcataaaagcgtttgtcttcaggtttatctctgtaccagccaagtggatcaggacatcaaggcggtatgtgctgaacatctatacctgtaataatgcttacgcagatgttttccagactgattttggataatgcctacaacttatgggaatgatattgtgtattgcctcaagtcacattgtggggtaaggggatattgtaggcagaagtgggtgcttcaagttcaaattatctgcaaattcagtaatgagaggacgtgtaaacgcaataaggacgttcaagggcttagttgcggatttgaggtttatgaatattatagtccgcgcctataatgaaggagttgctttccgctatcattttccggaaatgacaaacgggcttttcttgcatattgtcggtgagcagactagcttcacaatgcctgaaggaacgatggcgtattatgaacgttgggcgcaaggaccttatgaacttcgtccgttgaaaggatggggtaaagaggagagtgagcgtccattgacattgaaacttcctgatggattatcagtagctttgttggaagcagaaatggtggattatgttcgtggtaaattccgtttatcggcagagaaaccttccactttggagacaagcctgtatagtagcgtcgatattatttctccttacagtactccgtggcgtgtaatcatggttggcgaacgtccggtcgatttaattaataataatgatcttgtcttgaatctgaatccggcttgcaaactggctgatacttcttggatcaaacccgggaaagtattccgttcgggcgacttgaaacaagatagagtaaaagcagccattgactttgcggcagaacgtggtattcagtatgtgcacatggatgcaggatggtacggaccggaaatgaaaatgagttcggacgctactactgtttctcctgataaagaccttgatatacccgctttgtgtaaatatgccgaatcgaaaggaatcggacttatggtgtatgtcaatcagcgcgcattagtgcagcagttggatactttattgccattgtataagaaatgggggctgaaaggtgtcaagttcggttttgtacagataggtaatcagcgttggagtacctggctgcatgatgcagttcgtaaatgtggagaatatggtctgatggtagatattcatgacgaatatcgtccgacaggtttcagccgtacttatcctaacctgatgacgcaggaaggtattcgtggaaatgaagaaatgccggatgctacacacaatatgactcttccttttacccgctatctggcaggtgcaggagactatacgctttgctatttcaataaccgggtgaagaatacgaaagcacatcagttggcgatggcagctgtgtattacagtcctttgcaatttatgttttggtatgacagaccggagttctaccagggagaagaagaactggaattttggaaagcaattccgagtgtatgggatgacagccgcgcgttagatggagagattggtgaatatatcgttcaggcacgtcgttcggggaatgactggtttgtaggagcaatgacgaatacggaagcccgcacaataacattgactacggattttctggaaccgggtaagaagtatatgcttcacctgtacgaagatgatgacaaattgaatacacgcacaaaagtacgcagtactcataagaagataaaagccggagataagcttgttttgaagctaaaagcgagtggcggagccgcattgcatttcactccgctaaagaaatgactcaaattattttgatggtcattgagtatgtgaaaatgacaagtaaatgataattttgcggagtgccctgaaagggcttaattatataattgtaaggctttcagccgaactgcaaaattcccatttaaccgctaaattcccatttgtagtctttattgggatttactatttaccactatttaccataattaatcaaccacttcaccatctccggatcattgtgggagaaaaagagtgttttagctgtatcaagcgcagcgatggccgctatgtcatccggtgctaatgaaaaatcaaagacattgaaattctccatcatacgttctttatgagtcgatttaggaatcacgatgatatcgcgttgaatcagataacgcagtgcgacctgtgccactgatttgccatattctttaccgatttcctggagagtcgggttggtaaagaagtcgtttcgtccttcagcaaacggtccccatgacataattttagtaccatattctttcattacttcctgcaactttatctgttgattgaaaacgtgtgtctccacctgattgacagcaggagtgacttcgcagaattctgccaagtcgacaaaacggtctggatagaagttgctgacaccgattgcacggagtttaccagccttatatgcttcctccatagcccggtaagttccataataatcaccgaatggctgatgaatgagtagtaagtctatataatcactttttagtttgcgaagtgattcatcaatagaagctttagctttttcgtaaccggcatttgaaatccatacttttgtagtgatgaacaattccccacgtggtacgccgcatttactgattgcatttccaacaccttcttcgttatgataggcttgtgccgtatcaatagaacgatagcccacactgattgcatccgacacgcaacgttcacactcttcaggcgtaacctgataaacaccataacctaaaataggcatttcaatgccattgttcaatttcactttttccataatcgagtatattattaaaataaaagcgtattctaatgtttttattatctttatttcctctatgcaaagttagtctgtaaaaggtaatctgtttttatatagattacgggttttgctaccttttttacggataacgctatctttgcatttaatatctactattatatatagtcgttttttgagtattttgttcttcatattcgtagtataggaagttaaatcaattaaaagaagcattatgaataaatattttcttgttgtattgttgtcattattcatgcaggttgctaaggtggcagcagctccctggcagtggtccgtagaaataaaagagctgatttcagaagagacaaacgcccatccttctgcctatctatggataccggaaaactgtaaacaagtccgtgccgtcatcatcgggcaacacaatatgaccgaagaaacaattttcgagcatcctgaatttcggaagaatatgggcaaactgggaattgcagagatatggatcactcccggaatagaccaacgctgggacgtgacaaaaggtacccaacaaatctttgaaacaatgatgaagaacttgtctgaaacaagcggatatacagaactggagtttgccccggttatacccatcggacactcggcaatggctacttatccgtggaactttgccgcctggaatcctgaacgtacattggccgtactctctattcacggtgattctcccagaactcatttgacgggttacgggcgtgcgaatttggattggggaacccgtacgattgaaggtatcccctcattaatggtaatgggagaggacgaatggtgggaagaccggttgataacctctttcgattatcgtcgtgaatatccgaatgctcccctttcatttcttgctgatgcaggacacggacatttcgacatatccgatgaattgattgattatctttccctctttctgaaaaagacagtggaatatcggttgccggagcattcgtcattggatgctccgattcagttaattccggtagaagcaaagaatggctggctggcagaccgttggcgaaagaatgaaaagcctacagccgaagccgcttcctatgataagtataaaggagacaagaaccatgcgttttggtattttgataaggaaatggcagatgccacagaaaaatattacgccaatgagcgtggaaagacagagcagtatatcggctttgagcaaaaaggaaaactgataactttcaatccgaaatcccatgtacgtatgtctccttcttttcaacccgaagcggacggagtcactttccacctgaaagcagtgtacacagatacgttaaggaacgaatattcaaaagaacacagtacgcatcccattcgaatgtcgagaatttgcggtccggtggaagtggtgaatgatacaacttttactgttcgtttctatcggatgggattggataatcctaaacgtacaggaggcatctgcctgatggcttccgtaaaacaggatcataaataccggagtgccgttcagcaggtagagattcgtattccttaccggaataaggaagggataccccaacgtataattttcccgaaactatccgatgtaaaagcttcagtgaaagaaataagtttaaatggaactgctgactccggccttccggtttactattatgtaaaagaaggtccggcagagataaaaggagataaactggtattgactaaaattcccccacgtgcaaaatttccggtaaaggtgacagtggtagcctggcaatatgggcgtagcggagaacctaaagtgcagactgctgaagcagtagaacagagcttttatattactgcccgttagtttgacaaagagattgttcaaggaatcagagtactaattccttgaacaatctttccaaagtcttatctaaatcagtagaaaatcccggatgtgggcgagatacttgtatgcaggaactttttactgcagtcagccaacgaaatctgtcagaaatatccatattggctatggctcctccctctttatttcccatgcatatcttgtcaaagacctgtaacccttctttcaggcaattaatatccagttcggaagaaaacagttttagtttgttctcatctatcgtatagagggatttcaggtatttggcttgtttggaaaacaacacaatccccatattgataaactcctcccgttctactttaggaacgaaacggatgactgcgtattcatataagtgcctttcttgcattttgcgcttcatttacaaatgtttcggaatgtttcatcctttcttctaaaaatcgaatataaatgtctctcaaatcctgtggagtttctgtgccttctgtccagttcaaccagtcgtcgggaatagcattgactatctcacggattttatccgaagtcaatatctgtctgaattcgatatctacctcttccagtttatcggcaaacggcaataatacatggtcttttatctgtacaaaaggaaccagtgcctgtttttgccagttagtccaggaatggtggaaataaagggacgccccatgatctatcagccatagttctttgtgccatatcaacatattggtatttttaatggtacggtctacgttagtcagcaaggcatccagccatactacttgcaaagccgtttttccatctacttgatgtactatcggatcaaaagtcaacgaaccggaaaggaaatgcaatcccatattcagtcctcgactccattgaagtaaaccctgtatctcttcgtctgcttccgttcgtccgaaggcctcgtccagattcagaaaaactatttcggggactctgaaacctagtgcacgggctatctccccaccaatcagttcggcaatcagtgctttcgtaccgtgtcctgcccctctgaatttgactacatacttaaattcatcgtcagcttcggccaaagcaggcaatgagcccccctcacgcagaggaagaatatatcttgtaacatttgccgtacgtaaatccatgtagctcctttctttgattcgggcaataaagataggacgtttttgtggaatagtaggtgaaatgcttttgattataatagttttttatgtttttcggttgagtatacgttagtgtctttgcgaatatctttcattttttactatctttgtccttgaagtttgagaagaacggcatctgcttatgaaaaaatatattctgcaattaatcatagtactggtttttatactacttaaagttgaaggagtttattcttcttctcctatgaattattataatataacgacttttgagggactgccaagtaatacagtaaatgcaataaagaaagatgcatccgggtttatctggattggaacaaaggtggggttgtgccgtttcgacggatgtgaggtgaaaacttatcccttactgtcagaagatgatatttggtcgatagaagaattggatagcgatacattgctgcttggtacagtttccggactgaaatactttagtcgtaagactaatgtaacggtaaaactggacattccatctgcaatagtcaaatcaatccggaagattgcagacagccaattttttgtgggaacggaagctggcctttattttataaataatcatactcctcgtcagatatttttagaaaccgggctttcaccgtgcaatcatatcacgtctattatttgtgaggataagaatatatattggttttctaccgccgacgggttgggtagaatagatatccggacgatgcaaccggagatttaccggatgccggaagagatatcaaacagcaatttcttcatttgtctcacgcgtatgggcaaccatatctatttgggtagtttcaataaaggaatattcagctttgatatgtccggaaagaaatttgccaaagtgaacggttttgaacataatctgataatgacaatagacggacaggataaccaattgtttgtcggtacaaatggacagggattgaaagtgttgtctttggaagatggaagtatcgaagttatttcacataaggagaaggcacggaattctatcagttccaatacaatcactgcatttttatatgataatggcattcgttggattggaacccagtttgggggaatcagttatacacctcgtattggtgccaagttctcttattacagtaaaaatgatttttactcaactgattatcgggttcgtagtttttatatgtttcctaatggagacaagctgattggtacaaggacagggcttttctttatttgtgaaaaaacaggggaaataagaagttatagtttggagaaaaacttttctaatttgcggtcggacatagtagtgtttataaatcggatacaggacaaaatattgataggtacttacggtggaggggtgcatgtttttgatgaaaaaacatggtctttaagggacttctcccatgaagagttgtttctgtatggttgcattcttaatattgtagacgatgcgaaggggaatttatggtttgcttctcaaagtggactttatcagagtacccctgaaggacatgtgctgaagaaatatgatacgatgaactccgtcctgacaacaaatgccatattatgtttgtgtgttgattcgatgaatcgtctatgggtaggtagcaaattcggtctgtttttattggatattgctacggggaagatgcgtgcggactgttttagtgttccgataaaggctgaaattaagtatattatggaggacttgcggaaagatatgtgggtttgtacggataatggtttgtataagatagggaaggatttggttgttcatgaacattttactactgataatctgcttccggataatcaagtgccttgtatcctggaagatagtcatggaatttactggatcgctacacaaaaagagattgtacgttacaatccgatagaagaacagcattatacatatcagagacaggatgggttgagcggtctggaatttaataatagtgtctttgtttccaatgacagtattatctggtgggtcaatgaaggcgggttagtctataccacaaccgggaatattaatacagaacgtcgtattataagtacccctataataacatcgtatgctatttctaatatagaatatgactttccgtatatggacatgtcgaaaggaattgaattgccttcttctgaaaatactcttcgttttaaattttctaatatggattatgcgttgccttatgctaatttctatgagtataagttggaagggtatgataaggaatggttgaaacagacagggattaatgaagtttcttataaggacttaccaggaggacattatgtcttcaagttgcgtgtcccgggcggtgaaaaacagatgcagactgtggatatctatgtccggaaatcatatacttttatggcaggcatattattgatggttctaataataagtattctagtaatatatttctgttaccggatatggaaacttaaaaagcggatgacggatgagcggatgatattaagtaaggttcaggagagaggtaaagataaaaaggcggcattgcccgaaatgaaagtgaatggtatcttggataatttgctttcctatttggaacatgaaaagccttatctgaatccaaaattaagtattggggacgttgctgcaaaattggactgtaccgagacagagctttctcaattgctcaataaccacatgaatgtgaacttctctaatttcattaatgtatatcgtgtcaatgagattaaaaaacgtttaaatcaggaaaacctctcaaaatatactttgaaagctttgtcggaacaatgcggctttagttctaaggctactttctatagagtattcaagaatgtaactggcatgacaccactggaatattgtaagaaacagaaccttgtgataaaagaaaattgagtaaaacctatattctcattttttttgagacaagttttatgatgcttatctgcttgtacaacaatgctttatgttgaaaatgtaattctcattttagttgagataaaacagcgcttctattgtttggaaatagggtgagattatgtgtagttttgcatcagacagggacagaaagcctttcgaataaggcacgaatccttgctgatgtttaactaaataatcaatattatgaagagcattttggaagttataatccttttacttctttcctttctgatagggagtaataagtcggttgatactgcttgttcattgcccgacacctctcaatggagtgtggctaatagtgatatttgtttaaaggtgaatggagattcgattttttggactatgaaatctgataaaaaggatattcctgctatcacggcatctgccagatacaatttgcttacttccggaagaatcagtctgacgtacagcttacctttattatctcaagatttatcctatatctatggagaaaggaatgagatactgcatcgtcatattatccatgcatccttatgtaagcaggaagatgataaattggtattttattcatctgcgggtgattctattgttttttgtcgtaaaaactaaaatggagacggaagatatgcagacaatgaattctactacaaatcaattattgactgaaacttacacatccttatgtcccataatcattcattatataaatcgtaaaatcaatgattatgaatctgccagagacatggcgcaagatgtgtttcttcgtctcatggaatataagcaaatacttcgtaaagagacagtgagaagtatggtgttcttcatagctcacaatctggtggttgattatttgcgacgttattacaggaagcaggaaatgtctgcctatttctatgaatatggcgtgaacattactgatgatacagagagcggggtgatagccaatgacctgtcggcacaagaaaaactgaaactgcttcaactttctccgcagcgtcggacagtttatataatgagtcgttttcagggtaagacagcacctgaaatctctgaagaattgtgcctttcgcgacgtaccatagagaatcatttactggctagccgcaaagagattcgtgaatatatcaagtcatgtatttgagagttatactatatcaacaaaattgttaattttaaatttaaaaaatgtgaataagaagttattgaaattttcatcgaaaagaatattatattctgcgatgatggcttccgctctattggcaggaagcccggggactgcttttgcagacacggataatatactggaagtgttgcaaaacagtaccgtacgaggtaaagttgtcgatgctagcggtgaacccgttatcggtgccagtgttgtggtgaaaggcacaacaacaggagtgattacagacttagatggaaattttatcttaagtaatgtttccgggcaagcggttttagttatatcttatgtggggtataagtcacaggagattgctgtaagcggaaagtccgccataaacgtcacgatgcaggaagatagtgaaatgttggacgaagtcgttgttgtagggtatggtgctatgaagaaatcttcattgaccggttccgtaacagttgttgatagcaaaatattcgaaaataaaggaagcatgtccaatcctcttcaggcattgcaaggacaggctcccggtgttcggatcacacgttcatcatcagctccgggtgaagaaggttggggagtatcccttcgtggtgcagtttccaaaaacacaacagaaccgttgcttatcatagacggtgttccttcagacgcagtttcagacctgcaatatctgaacccttcggatatcgagactatgaacttcttgaaagatgcttcggcagctatctatggagcaaaagctgcgggtggtgtaattattgtaacaaccaaaagaccgcaggccggtaaacttaagatagagtataatggctcatatacccgtaagatgccgggacttcaagctgaattgatgagcctggatgagtgggctggttcatttctgcaagcaatggagaatgacggccttgacgatacttatacatggtatcgatatgtcaagttgatgcaggcaaacaaaggtggtttcattaatgtacatgacgggagcaatcctaacccgattccaggtatgggtgtgaacgattacgtttttcaggatgtcaactggacggacgtgatgtggggacctgccaattctacgcaacacgacttgagcttttcaggaggtaacgaaaaggtcacttaccgtttgtctgccggttatttgtttgatgactccaacctgcgttggggagaaaataacaatcaacagtatactttccgttcgagtaatgtaattaaggccactgaccgtttgactatcgagtctgtcatatcagcagtccgtaaagagcaagttactcctacgcaaatcggaagggcgttgaatgttacgactccgttgccaggtcggcctgtttcaactattgatggcaagccttatttgtggggtaccgactatacagccaattggttactcgaattaggaggtgagaataaattggtggtgacaactttcaatttgaatgaaacattaaagtatcagtttacaaaagaactgactgcttctgcaacattcggatattcaacgaacagtgctatacgtgacgagaaaatgaaatctatccaatggtatcattatgatggaacagtgaatacctctacagcaaatccctatcctactcaagcggaatcaaaatatactaaacgtgcttcccgtacggataattactctgtatcaggttatttgaactatgcgaaaacgataggtaaaaatcacaatatcaatgtaatggccggtatgcaatatgatcgtagagattatgaaatcaccggaacgtctgccactgatatccagtcggaactaggtatcattaatggtaacggagtcatttctattgccgaagccaaaaagaacagctatgcgctcctttcctatttcggacgtttgaattataactacaaccaaaggtatctgatagaatttaacgcgcgctatgatggttcttcaaagtttcaaccggaaaacagatggaaaggtttctatggtgtttcagcaggttggagaattaccgaagaagcgtttatggtgaatattaaaaagtatattgaagaattgaaaattagggcttcttatggtgaggtcggcaaccaaagcggtatagggctttacgacggggtgcaactctataactttaatacagcttcgggcgcctatattggcgacggaaaagtttcatatattgctgcggctaaagaactggtgacaaccaatagaacttgggaaagaatcaaaaattataacgtcggttttgattttacagtactgaacagccgtttgagtggtagcgtagacctctatatgaagaaaaacgacaatatgttgatcgggttgctgtatcccggcaccttgggtggcaatgctccggcaagtaacaacggaaaattcgaaagtaaaggatatgaaggtatgcttcgttggagtgacaaaataggagaagtgagctatcatattggcggaacatatacttacatggaaaataagttgttgtcaggaggtaatgatgttatctctgccggtttcaacagcacgataaacggttatccgttaaactctgttttcggttaccgatatgcaggaaaaatacagaatgaggaagatttacaggcatataagaacctgtattatggaaacaatacgctttcaatgccctcgaatttacgcgtgggtgaccacatgtatgaagatgtgaataaggatggtaagcttacgcaggacgatttggtctttctcgggacagatgaccccaaagtaacttttgcctttgaccttggattggaatggagaggttttgatgtgtctgctatttttcaaggtgcggcacaaagaacggtttgtcgcgatgcagactcttggaaagttcctttcaaagcagtgtggatgaatacgtcaaaccatacgattggaaaagtctggagtccggaaaaccctaatggcagataccctgcctattcaactaaatcagaaatcaataactggaattatatgccttcttcatggtttatagaagatggtacatatctccggttgaagaatctgacagtgggatatactataccaagagccatattgacaaagataaccaagggggtacttgaaaatttcagagtatatgttaccggtacggatatttgggaaaactcaaaaattaatgatggctgggatccggaagcaacgcgtgcggtaagtgccagacagcgctatccttttactcgttcatatacttttggtttaagtgcaacattctaatactatatataatatgaaactatcgaacttatatactacattactttttagtttgtgtttgttgttccagtcatgtctggacatgaatcccgaggagcaactctcggatggcgacatgtggcagaatcgagggcaattcgaagcttttgccaagaatttctatggttggacacgcgatttcggtggtttgggggatgctcacggtgatgtacaagcagacttgtttagtacaaatcccaggaatcttttcagtaatggaacatctaccattccacttaccgacaaaagctatacagatgcttatgccaatcttcgtcaagtaaatctgttgttacaaaaggcagaatcttatgctcttcccgaagaaattaagatacctgttggtgaggcatattttttcagggcttatatctattttgacctgcttcaacgttttggaggagtcattaaggtggaagaaccgttagatatcacttctccggagctttatcgcactcaaaatacaagagaagaaattaacgaattcattatctccgatttgaacgaagcgatagcgcttttgccgaagtttaaggatatcactgctgcaaacgcaggcactatttcacttgagggtgcacaagcctttttatcccgtgtgggactttatgcggggacatgggaaaaattccataatggtaatggaagcaatacggaattgtcaaagaaatggttgaaaatagcatacgaagctgctgatgcagttattgagtcgaaaacattcgaactcttcaaaccgtctgatttggttattgaaggggatgaaggggctgcttaccgttatttgtttatactggaaaatgagaaatcgaatccggccggtttgaacaaaagtgcaaataaagaatatatattttccagaagacatgatacgacattggcacctattggtatcaatattaccgaaggtcgttttaataatgcgttatatgtaacacgtaaattggccaatatgtatcttcaaaagagcaccggattgccgattgatatatcgaagtggaattacgctactaaaaattcggagtatttcgaccgtgacaaccgcatgacaagcataatgatggtagacggaggtttttacttcagtagcaacggtggacgttatcgtagaacgtggttgggagatgcagctgaaattaaggaagccggagtgactgctcacaatgcagcaggtggtaccgggtaccgttgtcgcaaatggtgttcggaaagagaagtggaaaaccggaaggaaggatacgactatcctattattcgttatgcggaggtgcttttaaactatgcagaagcaaaatttgaatacgatgacaatatcttggatcctgatttggacaaatcgttgaatctggtacgtttgagagttaatcctactatgcctaaattgtctaacggactgcttcggggtacaggtacaaacatgagaacggaaattcgtcgtgaacgtacggtggaattgattgatgaatgtttcagactggatgacttgaaacgttggaaaacagcagaaaacgaaatgcctgaagatatgttgggaatcaaatatacgggaaccgcttttgaaacttccggttgggcaggggttgtgacgaatacggaaggatgcttgatttgggagagcggcagaaaatgggacaataagcagtatttgtatcctttcccgctggatcagttgcaactgaatacgaacttgcggcccaactggcaatctacaaatccttatgtgaaataattttaatgttataactatatgaaaagaatatatacattaagcaagacgatggctttcctgttttcatgcatggcactgataggaactgcaagctcttgtgcggacgattacaataccgatccgctgactaaaaataccattctatcatcgataacgattgatgagaaatatgaagtctatacactggtaaagggcgaaaactatactttacacttctctactttgccggaagatgcgactaaccccggggtgtcttgggtatcaggtaacgaagaggtggctacggtagatgctaacggtaaggtgacggctgttgctgtcggaacatcggttattacggcaaaaccagctgtcggatatgcagatggagtatcggctgccataacaattagtgtagtcgaagaacttgcgcttacacaatcggttgagataaccaatttgcctgaagagcttaccatgatggaaacgcaatcggttcagctcaaaacgaaaactgtaccggagaaacctagtttctatcttctatcgtggaaaagtagcgatgagaaagtggctacggttgatgaaaacgggcgagtactggctgtgggagaaggaaaagcgacaattactgcaacaactacagatggcacggatctgtcccattcagttgaggtaacggtaaaacctgttattcacgtggaaacattcgagatgagttctatacataacaaacttgccaaaggtgaaatatctgtgttgaaatacactgtaacacctgcggatgcaactgtatctgctttggtatggactacttccgatgctacagtcgcttccattgaaaaacgagttttgggagaagaagaggtattcgttatcttgggaggtgtaaattccggtacagcaacattaacggcaagtattacctatgctgacggttctccgggctttgagaaatcatttgaagtttctgtggtagatggtaagattaatgatgatttcctctttacggcaggatgtttcgaaggtggggattatggagtattggagaatggtagattagtgaggaagatagaaaaagaagccaactcgaaatgtgaagcacagttccgtggaacgatgactttctacccgtcgaaatatcctatatatgcagtgaagactttcttcgaagatagtctcgacccggccaagactcccacattgttacttaatatctggaacaataatccacgaatcagtatcggattctatggtggtactgctgcgggtaatgcacaaaatttatataaagtaagcatgacaagaaccagtgatggcggatatgtaacttatgccgacttaagcacccccaatattttcaagggagcaaatgccgactttttaacaaacggagtgctgaatgacggaattacattagaccgctgtgaacacaggttctatgatacttactatactgaagcagtaacggaaccttttgcgctcgattgggttaagaccttcgaatcattggaagcatataaggcttatctgatagagaatgaaggagttgtttttgaataattatttaaatgagatgaaatatgaaaaagaaaatgataactctagcgatggtgttatttacattcctgtcttgtagtaataaggactattttgatgaggggcatgttgacctgacaccgggttatacaatagaagaagaggatacttataaagtatacactttgaatcatccctgtctgatgcataccaatgacgatttccaatatgtagtggggaagataaaaacaggtgctcaaccttggggcgctgcatgggagttcctggaacagaaccaatacacgcaacttaacgaaaactggacaactgacgctcccgagattcttttgagaaattcttcaggtggtaactttaaagttgccagagaaccgggattggccgcctattatttggccttgcgctggagaatagcagaaggactaggtgaagaagatgcatataagtatgcggataaggctgtgaagattctggataactggtcgactgtatgtaaagcaattcaagtggagaatacgaatgaccattatgcgttagttaccggatttgacggacatcggtttgcgcaagcggcggaagtaatgcgggattatcagccttgggtagataatggaggattttctaagttccagacttggttgaaaaatgtagttgcaggtcctgcaacctacttcatcagtcaaaaaacagatccttactggtcttggggcggatgggaagttcccaacgtggcaatcatgctggcaataggtattgtatgtgatgaccaggatatgattaatgaagcgataaactattataaacatggtcccagttcgggatgtatccagcacttggtggtagcactgcatcaagaccctgccggtctgggtgaaggatattgccttggacaagctgatgaatcgggtcgcgaccaggatcatgccggattgagtatggctacactggctccgatgtgtcaggctgcgtataatatcggagaagatttgtatggtatcaaagcaaacgactcttttacgacagaagacggacgtgtatataatcgttaccctaaatatgctgaatatggggatgtaaatctgactcttgcattctttgaatattatgcaaagttcaattgtgatcctattgaagctgtagatatgccgtttacctattgggaaaccagacatggtcagcaaaacgaaatctcatatcaaggtcggggacacttctatgcaggatatgaaatgatttatagtcattataagcatgtaaaaggagtgagtgctccctattcgaagaagtttgcggagaaatatcgtccggctaccagtattcacccgtttgaatatgataatgattttcccggaataggtactctgatgttctacaaaggagaatgagttgaggtaacaagttgataagataaaaataagaaaccgtctgtaaacgggcggtttcttatcctgattagaataaagacaatgatgaaattaaagactataactgcattttttgcaataacatgggcagtttctactactgtttctgcccagaaggttagtatatattccaccacttctaccgaacgttgggtagagaaaaaacagacattggataaaaatcctgccggacaagcggatatctgtgtttatcctgacagtctgttacagaatgttgttgggtttggaggtacttttaatgaacttagttgggatgccttgcaatgcttgtctccggcagaacgtgataaagtgatggcagccttgttctcggaagagggtattcatttcgcattaggacgtactcctattggtgccagtgattatgctatgggatattattcctacaatgacgtaaaggatgactataccatgcgtaactttagtattgaccgtgatcgctatatcctcattccttatattaaggaagcgctgaagctgcgtcctgatttgaagatgtgggcctctccttggacaccgcctgcatggatgaaagtcaatgaacattattcgcagaagagttccggtattgaagggactgaagtggggcacaaccgtctcgaccctcatcgtaatcttatagggaatgttaccggttttaaaatgcaacaggggtatcttcaggcgtatgccatttatttttccaaatacgtacaggcttacaagcagaacggcataaacattcagatgattatgccgcaaaatgaaatcgcatggactccctgctggccttcctgtacttggcgtccggaagacttggctatttttgtcaatcagtatcttgggccccagtttgaaaaagattccattgatactgaaatctggatgggaacagtcaattatccgaatccggattatgtacgtacttttttcaagcagaaagattctgataaatatgtaaaaggtgttggcgtgcaatggacaggcatgcgggctttgccggctgtacataaagaatatccggattattgctacatgcagacagagaatatgtgtggtaattcggagaatgactggtctgctttggaaaacacatggaatgctgtagttcactgcttcaataatggtgttgattcttatatttattggaatatggtattgaacgaaacctgtaagagttggtgggactgggcacaaaacactcttattattgttgacagaaaaacagggcaggtacgctatacggatgaatattatttgatgaaacatctttcccattttgttcagccgggcagtcgcctgctgaaagtatcagatggtaagaatacgcttgctttccgttcgcatgatggtaaagtggtagttgtagcttacaatccggaagagcaagaacgcccttgtagttttaaggtaggtagcaagtatatacgtgttatattgaaaggtaaatctattaatacaattgtcatttgattatttttagtactttcggattgagtatttcggcatattgctgcgtattaaagaataagtactcataaagaatttacggttttatttaataacaatgttgttgcactgtcatttcatagccggaaaacgtggctacggaatggcagtgttttataaaaaatgtgtgattatatatgaaaagacaaatttgcagtattttattattcatattttgcgtgacattacaggcgcagttggtgacttatccggaaggtttgaaggcgaatatgccacataatgatgattatacggtgcgtgtccgtattccgggaggtgaatgggaagatttgtttgaatataatgtacaggtagatatggatgctgtgcagaatgcttcaatggttcagtttgatatgaatggaacggttgaggtgatggtgaaaaagaataatggaaccgtacgtgaggttgatatacgtcctcttagttgcaacatccaataccggcagaacaagaatgtgattacttttatgttggacaagcctcaatatctgtcagtggaatttaatggggacagacttcataatctgcatctttttgccaatccgttggaaacagaggtttataaaaaagcagaaaaaggtatcatgtatttcggaccgggtgttcatgctcctttggatttgccaaataatctgatacgtgttcctggcaatactaccgtatatttggctccgggtgcagtgcttaaggctaagttattagttgacggtgtagaaaatgtacgtattatcggtcgtggtatattggctcatccggttcgtggtatcgaagtgacgaatgcaaagaatgtactcattgatggaattacggtagtgaatccgaatcattatacggtgtttggtgcaggaacaaaagggttgacggtgaagaatctgaaatcctttagctgtaagagttggagtgacggaatcgacttgatgtgctgtcgtgatgtgctgattgacaatgtttttatgcgtaacagtgatgattgcattgcactctataatcaccgttggaattggtggggaggctctggcaatatcacagtgcagaatgctgttctttgggcggatattgctcatccgattaatatcggtggacatggagacccggaatcaccggtaggcgaagtaatggaaaaccttactttccggcagatagatattttggaacatgatgaggacgatgttccatatcaagggtgtatggcgattgattgcggtgataagaacttggtacgtaatgtcttgtttgaggacattcgtgtagagagtattcaagaaggcagactttttcatctcaatgtgcgtttcaatgagaaatatgataaagctcccggatggggaattgaaaatgtcactttccgtaatattacttatgacgggcttggtgagaatccgtctctaatcaaagggttcgacaacagtcggaaagtgaagaatgtaatctttgataatgtcgttattaatggtcagaggatgacggatttgaatggatttgtaaagaacgaatttgtagaggatatacgtgtgcggtaaaattagtttaaatagtagctttatagatattaaatatataaacaatgattatgagtaagcagtttttggttgcaatcgcattattggcagtatcggctatatcgtcggctcaatccgtgtaccccggacaacaccaggggaaaatgaaaaaagagacagtagctcctgtacgggtggaaagttttgatttgaaagacatccgtttattgccaagtcgttttcgtgacaatatgttgcgggattccgcatggatgacttccattgatgtgaatcgcctgttgcatagtttccggacaaatgccggagtctttgccggtcgtgaaggcgggtatatgacagtgaagaaactcggtggctgggaatccttggactgtgagcttcgcggacatactaccggacatttgctttcggcttatgctttgatatatgccgctaccggaagtgaaattttcaagctgaaaggggatagccttgtcaacgggctgactgaagttcagaacgctttgaaaggaggatatctaagtgcttttcccgaagaattgataaaccgtaatatccggggaaagagtgtctgggcaccttggtacaccttgcataagctttattccggtctgatagaccaatatctgtatgcagataatctgcaagccttgaaagtggtgactaaaatgggcgactgggcttataacaaactaaaaccgctcacagaagaaacccgcaaacttatgatacgtaatgagtttggaggtatcaatgagtcattttacaatttgtatgctatcacaggagacgaacgttatcgctggctggcggaatatttctaccacaatgacgtaatcgacccattgaaagaacttcgcgatgacttggggactaaacatacgaatacctttatcccgaaagtcatagccgaagcccgcaactacgagttaacccgcaacgagacaagcaggaaactatcggaattcttctggcacaccatgattgaccatcatacttttgctccgggatgtagcagtgacaaagaacactactttgatccgaagaagttatcccaacatctgactggctataccggagaaacttgttgtacctataatatgctcaaacttagccgccatcttttctgctggacgggcgattcatctattgcagattattacgaaagggcattgtataatcacatcttgggacaacaagaccctgaaacaggtatggtagcttattttctgcctttgctttccgggtctcataaactgtatagcacaaaagagaactctttctggtgttgtgtaggcagcggattcgagaatcatgccaaatatggagaagctatttactatcacaacgaccggggaatatatgtaaatctatttatcccttcacaggtaacctggaaagaaaaaggactgacaatccgtcaggaaacggaattcccacaggaagaaacaacacgttttactcttcaggcagaaaatcctgtccgcacgactatttatctgcgctatccttcgtggagcaaggatgtaaaagtttcggtgaatggtaagaaaatatctgtaaaacagaaatctggttcttatattgccattacccgtgaatggaaagatggcgatcaaatctcggctacttatccgatgcaaatcaaactgggaactactccggataacccggataaggcagccctgttatatggcccgttggtattggcgggagaacggggaactgaaggtatgcaagcacctgctcctttctcaaatccggctctttataatgattattatacctataattttcatgtccctgcacatctgcgcacttctttgaaactggataagaaacaccctgaacgtgctttgcaacgtgtaggaagtgatttgaagtttacgacagaacaaggagatgtgattcgtccgctgtatgatttacatcaccagcgctatgtcgtatattgggatttacaatcagaataatagatagtaaacaacgatatgaagaatcgtttattaattgccgcttttgtaagtatctgctttttgtctggttcttgcaaaatatcattcggtcagggaagtcggtatgacttctcttctttggattctgttatccaaggatgggtagacaagggatattaccccggagcatccatttgtgtagtgaagaatgataccgtcatttttcagaagaactatcgggattatacacccgatacaaaagtatatgtcgcttctgccggaaaatgggtagcggctgctgtcataggcgcggtggtagaccgtactgatttgggatgggatgatccggtagaaaaatggttgccggaatttaaagacgatgctaaaggtaagattcttctccggcaattattatcccatacatcaggagtacgtccatatcttcccgagcctcgtgtagataactataatcatttggattcggcagtcactgaaattcttcctttggatacagtctttactcccggcactcgttttgaatatggtggacttgccatgcaaattgccggaagaatggcagaagtggcgatgggaaaggagtttgaaacgctttttcaggaactgctggcacaacctttggaaatgaagaactctcattttaccccaatcaacacggacggcggacatgcacccatgttagggggcggactgtgtactacaatgaatgattatcttcacttcctgtccatgatttatcacgatggaatgtataatggcaagcaaattatatcagcagaaactgtgaaagaaatgcaggccgaccaagtgaaaggcgccataatcccttcgaataactcggataattatgtagcgaaaggactgggacaatcccacaatggagtctacggattaggagaatggcgtgaattaatagataaaaagacaggtgaagcttatcagattagttcaccgggatgggccggtgcttatccgtggataaataaacacgataaagtttacggattcttcatctcccatgtaacaggttcttctgctaaagaagatggtttctcttctttctttggcagccctgtcatttcacggactgtttcagaaatactgaaaggcaagccattggttgtcaaacaagggcgtatcaatgtaggaaacggctctctatactatgaagaagccggtcagggtgaaccgataatttttgttcacggtcattcgctcgaccatcgtatgtgggatgaacaattttctgtgtttgcgaaaaagtatcatgtcattcgctatgatttaagaggatacggcatttcttcttcccaaacagaagattatcaatttatgcatgttgaagatctggttactttaatggactctttgcacatcaagaaagcgcatattgtcgggctttctttgggcgggttcattactgctgatatgttggcgtatttcccagaccggatgttatcggcttttttagccagtggaaacatccggaaatcgaagggtcccagtgagccgatgactaaagaagaagcaaaggtgcgtgatgaagaaataactgccctgaaaaagaaaggagtggaggtgatgaagaaagagtggtttgaaggattaatgaaatccggtggaagtcaacgtgaacggatgcgtgctcctttgtggcagatgattgacgaatgggatgcatggcaaccgctacacaaagaagtacgggtagtagcagggctggatgctattgaagaattgaagaagagtcaccctgccgtaccttccttaattgttgaaggtcattcttctgataacaaattttcaaaaaaaactcccatattggaatatctacctaatggaaagctgaaaatcatagaggattgcgggcacatgatgaatatggagcgaccggaggaattcaatgcagctttagaagaatttttaatcaatattgaacagtaaaatgaaaaagcaataaatatcatgaaacaaatagttctatgcctgatcggaatattatttgcatcgtttgtatctgcacaaaagataaatcatccttcccttttgtacacccctcaacgtattcagcaggtaaaacaacgtatgcagaatgaaccgaaattgcgggaagcctgggaggatattcagaaaaccgccgatgaagctttgcaaaaggaagatttcaatcggttggattatttgtcgttggcctatctgatgacggataataaagagtatgcaaatataatcaaagaaattcttttgaaagctgtggaagccgaatcctggggagatatggaaatgatggcacgtattccagtctggcgttcgcaactgggcatggcacataagagcttcctttctgccataggatatgatgcggcttataacataatgtcttcttcggaaagaaaaaagattgccgaaggcttgaaacgattggctgtagagtctgccttgggcgactggctgttggaacctacccgaatccattctttgaactctatgggacacaactggtggacttcctgtgtatgccagggtggaatattagcattaagcctacaaaatgaacttcccgaagtaaaagattgggtggagcaacttcatgaatcacttcccgaatggtttgactttgcaggcgatgccttgcaacagaaagcaaagagttttgatgaggctggaggaatgtatgaaagtctgaattatgcaaactttggtattcaggaagctctattgtttcgaatcgcttggataaacactcatccgggacaaaatcccggcaatataccccaattggcaaaacttccgaactacttttctcaagtatgctatccgcgtacaggaatgctgcatagtttgaattttggagatagccataaaaatgtatcggcagaatccagtatgatgttattgtatgcattggggatgaaagatccaacaatattgtggtatatagcccaagtggaacaaggacaacatcgtgatggctttttcctgaatcgtccgatgggctttctctatacccctgatttgagtaaagctcccgtaactcccgatttgaaaacctcacagctattctcggatttcggttgggccaccatgcgtacttcttgggagaaggatgctacgatgcttgctgtgaaaagcggtcatacgtggaatcattcccatgcggatgccaactcctttattgtttttcataaaggcgttgatattatcaaggatggaggaaactgctggtatcccaatcttgcctatcgcaactatttttttcaaagccaggcacataatgtagtcctgttcaacggggaggggcaacctcgtgaacaacagtatagcggctctactttgcgaggaaatctttatcatctcttggatgcgggtaatgtgaaatatgttttggccaatggaacaggtcctgtctctaataatttcagccgtaacttccgtcatttcctgtggatggataatgtgatttatatgatcgatgatttgaagacacataaggtaggacagttcgaatggttatggcataccaatggaacttataagaaatcgggcattgacgtgaatgtgacaaacggaaattcttcagtagtcatccgtcctttatatccccgcatgttggctaagtccgattttgtgcacgactatcccgaagatttatattgggaagaaatagaagctcctacggaagatttgaaaggaaccgaaaaatattattcattccatttaccagccaaggtgaaccgtgtgaaaggactgacagctattattctgaaagacactcccgatgaaaaagacctgcctaaaatggaaagacgtgaagggcaggactggatagggcttcgtatccgtcataaaggtaaaattaccgatttatatatcaaccaactggcggacggaagattaatgcacagtaattcatggattatgcccgacggctggatgacagatgcttatatgtttgcagtttcttacccagaaggtactgaagcaaagaacgctaaggacttctttattgcttatggaagtgcattgagacggggtaatgaaacttacttttcatcattggctaagctgttcgttattcagaaagcagaagataagaaacttgatctttggatagacggacagccgaagataaataccacctttagaagcacaaagaagcctgtgtctgtagaagtgaatgataagaaaatcccggtagtttatcagaaatcgcaggtgaaagtgaaattataaattctacaacatcgttcttgtatatatgctgttatctttttctaaggtagtaaattctttatttttgttactcaaatatttttcaaataacattgagtaaataatttaatcccttcgtatttgtttatgtgcatatagagaatacgaagggatgacttttttaattataagtacttccttttggagatttttatgtatgtttgtcacatgtttaatatgaaaggaagcagttgtaagtgaaagacacgattaaatatctgattcttatattaatatatttggcttgtggtgtggaactacaagctaaagactatatattccgtaatattgtcatgtccgacgggctgtcaggactgttggtcaatgctatttataaagattccgaaggttttgtgtggttagggacagataattgtctcgaccgttttgatggagtgaaagtacgccattttgaattccggggtattgagtcaggaagaaagaagcgggtaaacagcgttacagaaacagccaacaaacaactgtgggtaggaaatggaatcggactttggcgattgaatcgtacaaacagtcaattggaaagaattgtccctgaaaagattgattttgctgtaaatactttgttggctaataaggatattctttatattggaacagagaaaggcttattcattcataaagacggtcaattactacaggtcttgacagaccggaatatgtttgccgcctgtaacagaatcatggatatttgtctgaatgaagataaaaccgtattatggctggctacggtgcaggggctgtattcttattcactgaaagacggcaatattaattcctggcattttcaggagaatgtgcccgaagccgattatttccgttgcctgacccgtattggagaaacgctttatttaggcacaatgagccaaggtgtagtacgttttgatataaaaaaggaaacattctctcatacagtatctttaggctgcgatgtcatttctgatatatccagcgatgggaaagagactgtttatatagctactgacggtaatggcgtccacttcctttcacacaaagaccaacaagtgacacgtcgtttttaccatgatgtcaatgataaggaaggaattcgcagtaattctatttattccttacttgtagatgatagaggtgccgtctgggtggggcattttcaggcagggctggattattcactctatcagaacggccttttccgtacgtatgcctatccacctttattcaattcggcaaatctttccattcgttctttcgtaaacagaggacaagagaaagttatcggttcacgtgacggtttgttttatataaacgaagccaccggagtagtgaaaagttttgtaaagcccgttttgacttcagatctgatactgacaatcagcttctatcaaggagaatattatatcggtacgtatggtggcggtatgatggtactgaatccgggaacattatctctgaaatattttgcacaaggcgatacggagctttttcaaaagggacatatattctgtgtgaaaccggatgcaaaaggaaatctttggatagggacttcacaaggactcttctgttataacggacagaccaaacagatcaaacactttactagtgctaattcccaactgccggagggcaatgtgtatgaagtaagttttgattctacaggcaaaggatggattgccaccgaaaccggtatgtgtatttatgatccggcttctcaaagtttacgctctaatgtgtttccggagggattcgttcatcgggataaagtgcgtactatctacgaagatgctggacacaatctctattttatccgtgagaaagggagcttgtttacatctactttaacgatggatcggttccagaaccgctctatcttttctactcttccggacaattcgctaatgtctgttatagaagataaccaaggctggttgtgggtggcttgcaatgacgggttattgcgtatcaaagaagagggagaggaatatgatgctttcacttttaatgatggagtgccgggaccaacttttacgaatggagctgcttataaagatgaaaaaggactattgtggtttggtaacactaaaggactgatttatgtcgatccgaaacgtgtggacgaagtgcgtggcaaggttcgtccgattgtatttaccgatatactggctaatggcgtaccttttaccagttcctctttgaaatacaaccagaataatttgactttctgtttcacagatttcgcctatggtctgccatctgccttactatatgaatatcgattggagggagtggacaaggactggaaactattggctgcgcagaacgaagtctcttattacggactttcttctggaacttatactttccgtgtacgccttccgggaaatgagcaatcggaagctatctgtcaagtgacagtacgccctatgataccttggtggggatggacgctttccattttattaatcgtaggaattatagcctttatacggtattatgtctggaaacgtatgcgtcgtttgcttgtttcttctgcttcgctggtttcggcatcatcagtagaggaggcgatacaacaaagagaacagtctgtagaacatccggaagtaatttcagagcaacaaccttccgttgttgaagagaaatataagaccaatagactgactgaagaggaatgtaaagaactccataagaaactggtggcttatgtggagaaagaaaagccatatatcaatcccgacttaaaaatgggtgacctggctgctgcattggatacttcctcacattcattatcgtatcttttgaaccagtatcttaatcagtcctattatgactttataaacgaataccgtgtcactcaattcaagaaaatggtggcggacagccaatattcacgttatacattgactgcattggcggaactttgtggatttagttcgcgtgcttctttcttccggtcattcaaaaagagtacgggagttactccgaatgaatacatccgtagtattggcggcacagccaaagaagagtaacttttcaacttattatccctgaaatctattttgcatccatattcccttcacccttcacttctccctgttcatcggggttagagggtgaaccctgccctttcacttggtgaaccccttctcttttattcttttcctatctccaatctgttattagataagttcttcttctccccatctaaacttccttttccttaattgcaaagttgttttttataggaagcaaactttaaatgcaagttttgtttttataatcaaagcttgcatttataaaaacaaagcttgcaattatataatcagaactttcatttatagtttatcattaaccaaaagcaactttgcaacaagggcaaaacaagtttatcattaatgaaaaggaacttatctcttaatgtcctgcatcatcattagcctgaatgtaagataaagggaaggccaaaatggtgaagaaagggactaaagaggtgaagggggtgaaagcaaatgggtataaggagagcgaaaatacattgttttttagtaaacagagtatcagattataaaatgagactctgtttgctgtgagtgtaactagctgatatttagtgaaatatatgcgaataagtctatctggattctcagagattactccgccctattttcaagctgttatatccgaaatcccctctatatttgcatcgtgatcaaaaccgaaaaagatagtattatggagacaatagctaacacttacaacgacattatcacccgttcttatgaagaatattatcaggtgattcttacctatattacttatcgtatcactcatcgctacgaagcggaggatctaacccaagatgtatttgtacgtctgctggactacaaacaaatgctccgtccggacactgtgaaatatttcctgttcactattgcccgcaatattgtaatcgactatatccgtcgttattataagaagcaggaaatagatagctacatctatgatactatgtctacttctaccaatgaaacagaagaaaaaattatcggtgatgatttaatgacaatggaacggactcgtctggctgccatgcccgaacaacgtcggttaatttatacattaaaccgtttcgaaaataaaacttctccggaaatcgctaatgaattgaatctaagttgtaggacggtagaaaatcacttattccttggacgccgtgaaatgcgcgagtttttccgaaattgtatataatcttattcattaataaataaccctttgtgcttatggaaaaggagtcagtatttacaaagagacatctatatgcctcactttattttagagaacaaaaatttaatactatttttaaacctcaaatttaattttatgaaacgaagaggattaatttttaattcgcaacctaacaagacagtcgtgtttgcgttaggattaatgctgggactatgtcctgctacacagatctgggcttttgataatgcggatgagaatcaagttgtactacaatctcataaacaagtaaaaggacaaattgttgatgcaatgggagagccgattattggtgcaagtatacttgaaaaaggaactacaaatggggtaatttctgatattgatggaaatttctctttgaatgtaagtgcaccaaacgctattattgtgatttcatatataggctttaaatcactagaacttcctgcctctgatccgaatttgaagagaatcgtgatgaaagaagacacagaagtgttggatgaagttgttgtagttggttatggtactcaaaagaaggagtctttgactggtgcggtgactgttgtaggagctaaacaattggaaaataagggaacaatgtcaagtcctttgcaagctatgcaaggaacagttccgggagttattatcacgcgtaattctggagcaccaggagatgaaagctggggtatgaaactccgtggtgcatcttcttctaattctacagatccacttataattgtggatggagtggaatacagtgatggtattaatggtatgcgcaatctgaatccggatgatattgaatctataaatttcttgaaagatgcttctgctgcaatatatggttcgaaagcggccggtggtgtcgttctgattacaactaaaaaggcaaaagccggaaaaaccgttgttcagtataatggttcctttacaggaaaagttgttggattacaaccggaactgatgtccttagatcaatgggcagatgctgtaatcactgcacagactaatgatggttattcagattctaactggattcgttatgcaaaactggccaagctttataaaaatcaatatattgacttaaatcatagtactcatcctattccggaaggttttaaagacgttgaagattttgtatttatggataatgattggcaggatatattgtggggaaactcatggtctacccagcacgatctaagtgtctccggaggtaccgagaggaatttatttcgtttatcattgggatatatgtatgacaacagtactttgaaatggggaaataataataaccaacgttacaatatgcgtttgaataatcagttcaaattatcggataatgtaatgttgacatccagtattggctataatcgtcaagatcaggtgtctcccagtatgattggcaaggtcctttcccagtcttcccctcaaccgggtttacctgcttcgacaatagatggacgcccgtatggctggggtacttggcgtgcattgaattggtgggctgaagaaggtggcgataacaaactgaaggtttcggccattaatattagtgagtcattgaattggaaaatatattcagatcttgatatggttgtgaatgtgggatataacacgtctacagcaacacgtgagaaagtggaaaaatcaatagattggtataattacgctggtacaacattgttggcaacagaacctacacaggaaaatagtaaatattctgattctttctcaaggactgattattatatggcatccggttatttaaactggcataagacattggcagaggtgcataacttgagtgctatggctggcgcacagtataactatacacaatataaatatacttttgtatcagtaaaagacataaatccatctttggaaattcctaatggtgctggagaagttttgattaaagacggggatagcaaaccggcgaaatggcatgaagctatgatgtcttatttcggacgtttgaattacgattataaacaacgttatttgttggaaggtaatcttcgttatgatggttcttcaaaattccgtcctgaaaatcgttggcaattcttttggggagtatccggtggctggcgcttgagcgaagagagcttcatgcactcattgtcttccgtagttaacaatctgaaattgagactttcatacggtgtgctaggtaatcaaagtggagtagaccgttatgatggaacacagctatataattttgcttcttccaacggagcatatattggtagcggaaaagtttccactattgatacgaacggaaagatagtgactacagaccgtacttgggaacgtattcatagttataacttgggagtggactttgcttttctcaataaccggttgactggtactttcgaacttttcatgaagaaaaataataatatgttgattgatgcccagtatccgggtgtgttgggagacaatgctcctacaatgaatctagggaagtttgaggccaaaggttgggaaggaaacattacatggtcggataaaatcggaccagttcaatatcatattggtggaactataacttataccactaataaattgattgatttgggtgcaacttctgttttgaaatcaggttttgtagataagcaacagggatatcctttgaattcttattttggtttacgctatattggaaagattcagacacaggaagaattggaaaaatataaatattattatttggatggaaatgggataggaatgcaggataatattcgtttaggtgataatatgtttgaggacgtaaatggcgatggtgttttggatcaaaatgattatgtatatttgggaacagatgatccgaaattgtcttattcatttaatgttggattagaatggaaaggctttgatttttcagctattttccaaggagtcggtcgcagaactgtttatcgtggtggtgaaggtaacgaaacttggcgagtacctatgagtgccatttatttgaatacaactactcaatctattggcaacacatggagtcctgaaaacaggaatgcttattatcctacctataccagtgtaggatctattaacaattataattaccaatgttcttcctggtcagtagagaatgggtcttatcttcgattgaagaacctgactttgggatataccttacctgtttcgtggttggcaaaaacaaatgtgataagtaagttacgtatttactttaccggagcagatctttgggagcatagtaaattaaaagacggatgggacccggaggcttcacgcaaaaccaaagatctgggacgttatccttttaacagaacttttactgtgggtgttaatgcaactttttaaatagaatattatgaaacgatcaaaaataacatttttccttgctatagtgttaggaataactttgcactcttgtctggacatggaacctcaagatcagttggggggtaaaaacatgtggacttcagtcaatgattataaacagtttgccaatactttttatagttggacacgtgacttctcttctgttgtatatgatggaacacatagtgataagcgttcggacttgattacttaccagagctataatgaatttagccgcggaataaactcgatcccttcttcagatgctaactatacggataattataaacatattcgtcgtacaaacttattgatagaaaatgctgaaacttattccaaaccggaagatataaaacaatatttaggggaagcttattttttccgtgcatatagttattttgacttacttcaattgtatggtgatgttattataacgaagaaaccgttggatattacagatccggagatgaaggtaaaacggaacgaccgtagtgaagtggttgatcttattattgatgatctcggacatgctattgacaacttgccggcttttaaagaacttagtactgaagaagagggacgtatttctaaagaaggtgcgcaggctttcctttccagagttgctctttatgaaggaacatggcagaaatcacgtaataataatcagaatacggaacgtaccaagaatttactggatatagctgccaaagcagcccgaacggtgatggatgctaaatatggatatagtttccgcttatttggaacagatagtgaaacaaaagtattgggtgacagcgcacagaagtatatgtttattttggagaatgagaaatctaatccggctggcatcaagaaatctgctaatcatgaatatatttttgctcgtcgccatgaccagattttagcttcaatcggaaagaatataactcaagagtgtctggcaaatgtacaatggattactcgtaagtttgccaatctttatctatgtgacgacggattgcccatcgataaatcagatcgttttcagaaatatgatgagaaagtttctgaatttctgaaccgtgacaatcgtatgcgttatactttactaaagccgggaactcgttattggggaaataagttcggacggacttcttggcaatgggatgaggtagatctgaagacctcaaagctatatgatcctgcgtccggtacttgttatggtaatcaaaaatggagcgctgaacgtgttgttccggatacacaagaaggatatgacttcccacttatccgttatgctgaagttttgctgaattatgcagaggcagtgtatgaaagggatgataagatagaaaatgaagacttgaatatatctttgaaccaggttcgtcagcgcgtgaatgccagtatgccggctttgaccaaagaatttgcgcagacccacggactggatatgaggacagaaatacgtagagaacgtactgttgagctgtttaacgaaggttttcgtattgatgacttaaagcgttggaaaactgcagaaaatgagatgccgcaagcaatgttaggtattaaatggaaaggtactcaatatgagtcatggaatacgccattcagtttgaatgatgatggatgtattgttgtagaaacaggtcgccagtgggcagataagaactatttgtatccattgccttccgatcagttacagttgaatccgaatttgggacagaatcccggttggaaataacggagtatgaataaaaacagagaatcaatatgaaatatataacttttttatcagcgaaatgtgtatcggtgagccttgctatattaggcttgctattgtcggcaattgcatgtgacgataaagaatatggtgatgcgatgagtgaagggcaattgatgaatgatattgagatgaatatagaatcatccatagcgttagctgtaggaatggatatacaggttatttgcaaatctgttccggagaatgttacttatccggagttgtcttggaaatcatcagatgagaatatagtatctgtgtcacaagaaggtaaaattactgcaaaagcagtaggaaaggcaaaagtgaatatatcccagaaagcggcctttgaaacacttaaaacgatagatgtggaagtaaaaccggtagctactgcgattgagatggatgactttgaactgtttgaaggcacgactaaaaaagcctctgtaaaaattacaccttctaacggatataatgtctttcattggaaaagtagcaatgaggaaatagtaaaggtggatgcagatggtactgtgactggaattatcccgggagaagctgttgttacagctattgccactgatggaacttctttgacagtttctgctaaagtgactgttcggaaggtaatcccggtagaatcaatacaattagatccggttgatgacataatgattggacagactgttgttattggctgtcatttagttcctgaagaggccacttccggtttgttaagttgggtaagtagtgatgaaaaagtggctgttgtggatgccgatggtgctgtaacgggagtgggttatggaactgtgacgattaccgcaaccgatcctatgtcaaatatttcggctaccactagtgttactgtaggagccttattggattatcagttccaatctactttgaaaccatgtgatttaaaacctaatcaaggtggtacggttacatttgataatggatatgctcatatcataatgaaaggtcctgacggtaatggaaattggcgccaagatattaatatagttaatgatgcatatcaaaagaaactggagtatgctcctcaaacttataaatatttagctattaaattaaggagaccgcaacaaagtgcaactgcgaatgcaggtgtgttgaagtttgatataggagatggagtgactgcaggtaattattgcaattcagcagattactatgtgtttgataaagaaactctcaccatcgtaaaaaaaggtacaggagtagaaaaatatggtgagcctaatatctatgtatatgatatgtctgtagataatgctataaaaggaagtagcccaatattaaccaatgaggccggtgttgctactatgacattgttatctttgtggattgctgatgttaaagaagccgcaatcgataaaacgtatgatatgtattggataaaaaccttcaaaacattagaagatttgaaagcttacatagaaaaagaaaataacaaataaatctgaagtatgaaaacgaaatatataaatgtgttatttagttttgttatagcatcttttatgatgtcatgcagtagtgaaattcctactggggacgcaaataagtttagtgatatgaaaagtccggaggaggatatggtaaagagagattatttgccattgaaccatccttgtatgctccatacgcaggctgatattaatagggtaaagagcaatttgaaccgatccccttgggcggaagcttatgcccaattggaagcaagccaatatgcgcaaagttcttatactgaaaacacaagagctttgcttgacggatatttgaaaagaatggataagaataattggtcaggtaaatattcggattattcaaattacacagcatgtatgtatgatgctgcggctgcttatcaattggcacttcgttatcagttatcgggaaatacatcatttgcggatgctgctgtgaaacttttcaatgcatgggctactaattgtaaggggatattaagaatggaaggttataccaataatattccagatcctaatctatatctaattcctattcaggcacatcagtgggcaaatgcagcagaattacttagagactataatggctgggatagggatgattttgaaaagtttaaaacttggatgaaagatacattttatagtgtttccgatatgtttcttaaaaatcataatggtggacaaggtaatatgcactattggttaaattgggatttggcacagatgacatctattctttcaattggtattttatgtgatgataacgtgatgattaatcaggctattgtatatttcaagaatgaagaaggaagatataaagaggcgggaaatataaagaatgcagttccttatttgcatcaagacccggattcggatgaaatacttgggcaatgtgaggagtccggacgtgaccaggggcatgctactttatgtgtttctttgatggggacattctgccaaatggcctataacattggtgaggatttgtttgcttatgataattatagggcagtagctatggcagaatatgtaggaaagtataatcttatcaaggatgagtcttttaacaaaggaacattggtaggggatgatttcatctatgattctaattctttcccttatacttcttattctaatccctcgtatacaaacgcaaccatatctacagagcaacgtggcactaaacggccttcatgggaattgttttatggatattgtaaggagaaaggaatttcttctctctatagcgaaaaatgggctgaccagatgcgtcctgacggaggaggtggaaactacggaccgaacagtggaggatttgaccagttaggttttggtacgttgatgcattatagagaatgataatattcatttttgaatattttttgtaaggggattaggtatttacctaatccccttcgtatatataagcaaataggttaagaaatagattgtttgaaatcagagattggattcagtttttgaagtgattagtttttgtgaaggtagaaagaacctgtttttaggaataacgaatcttattttgaatgaaattgattattaaggtatatgcgtaaaaagattctgtttttagcaggaatgatggcttgctgttcattggcaggtgcacaagaaatctctaagacctgggtggctgataaggggaatggaacttatcagaacccggttcttcatgcagactattcggatccggatgtatgtgcagccggagatgatttctatatgacagcgtccagttttaattgtattcccggaattcctattcttcattctaatgatttggtgaattggtcgttagtaaactatgctttaccgattcaggagccggaagaattcttcgataaggcacagcatggtaaaggcgtatgggcaccggctattcgttttcataacggagagttctacatttactggggtgatccggattatggaatctatatgattaaagccaaagacccgaaaggaagatggagcaagcctgtattggtgaaagccgggaaaggaatgattgacccgacaccactttgggatgaagatggaaaagtttatcttgtacatgcatatgctggtagtcgtagcggagtgaatagcatcgtagttatttgcgaactgaatgctgagggaacagaagtaatttccgatccggtgatggtatttgatggaaatgatggaaagaaccatacggtagaaggaccgaagctctacaaacgcaacggatactactatatttttgctccggcaggtggagtagcaaccggttggcaattagtacttcgctcgaagaacatttacggcccttacgaatcgaagatcgtaatggcacaaggaaagacaaatatcaacgggcctcatcaaggtggctgggtagataccaacacaggagaatcctggttcgttcattttcaagataaaggagcttacggacgcgtgattcatctgaatccgatgacttgggtaaatgattggcctgtaatcggagtagataaggatgaagatggttgcggtgaaccggtaacgacctataagaaaccgaatgtaggaaagacatatccgatagccactccgccggagagtgatgaattcaatacccgtcatttagggttacaatggcaatggcatgccaataaaaaagacacttacgggttcacgaccgacttggggtatattcgtctttatgcaggcagtctctcaaaagaatttgtgaacttctgggaagttcctaacttgttgatgcaaaagtttccggctgaagagtttacggctacaaccaaattgacatttactgccaagcaggatggggaacaaaccggaatcattgtaatgggatgggattatagctatctctccattcgtaaggagggagatcagtttattctgcaacaagcagtctgcaaggatgcggaacagcaaaatcccgaacagataaaagaattggcaaacattccggtggaacatctgaagatgccgggagtagcagataatgagtggcaaacagtttatttgcaagtaaaggttcgtaaaggagccgtttgtacattcgcttatagtctggacggaaagcaatacatgacagtgggagagcctttcacagcccgacaaggcaaatggattggagccaaagttggagtattttgcgtaactccgaatgagggcaatcgtggatgggcagatgtagactggtttcggatgactaagtaactgaccgatcaagtaactgacaaagagaaataaagattaagaattaacgcgaatatatttgaactaagatgaaaaagattgtagtaggtctggctgtgatgttaggtttttgtatgtgcactcacaagccttccggtacattggatgtgaatagggcattagactactgtgcagagcagacacaacgtacgcttacggaactgaaaacagattccggcattgactatacgatgatgccacgtaacattatggctgacgaacaccactggaactgtcgtaaggcaacgaaagaagaatggtgtgccggtttctggccgggtgtgctctggtatgattacgaatatacacaggataagcatattctggaagaagcgaagaagtttacgaactcattggaattcctttctcgaataccagcttatgaccatgatttgggatttctcgtattctgcagttatggaaatggctatcgcttgacgaaagatcctgcttataagaaagtgattctggatacggccgattcgctggctactttattcaatccggttgtaggaacaatgctttcgtggcctcgtgaagtggaaccacgcaactggcctcacaacacaatcatggataacatgattaatctcgaaatgcttttctgggcagcaaagaatggtggaaatccttatttgtatgatgttgccgtttctcatgctgataaaacaatgaaatgtcagttccgtcccgattatacatcctaccatgtagcagtctatgataccatcactggtaatctgataaaaggagtaacccatcagggctatgcagacagtaccatgtgggcgcgtggtcaagcatgggcaatctacggatatactgtagtctatcgggagacgaaagatcctaaatatcttgatttcgcacagaaagtgacagatgtttatctcgaacgtctgccggaagataaggttccttattgggatttcagtgccccgggaataccggatgctccgcgtgacgcttcggctgcggcagtagtggcctctgctttgcttgaactatctacttacctcccgaatggaaccggaaaacgttataaagatgcagctattgaaatgctggcaagcctgaactctgacagttatcagagtggcaagagcaaaccgtccttcctgcttcatagtgtaggacattggccggctcattcagagatagatgcctctattatttatgcagattattactacattgaagcattgcttcggttgaaacgtctgcaagaaggaaagaatgtaattaaataaagaagatttatatagaataaaacactatctttatcacagttatttaacaataaatctatgttgtatgaaacagtgcattaaaacaaatggagttttattctttttttgtttgatatcattaatcattactgcacaggagcaatcagtgcagtctaatatcaaatgcttgaattatcctagttcgtttgagttattgcttcggcattttaaaggaaaaattgtatatattgatgtaatggcatcttggtgtaaaccctgtctggcagaactcaaagaatatgaaaaaacagatgattttttcaaaaagaatgatattgtaagactttttatttcaatagatgaacccaaggattggaatgcctgtttgaaaagattggatgaaagattattaaatgggtattttgtcacctatcatcgaccagagaatagtgttgagaataataaattttctgttgaagtggagaagttgtttgtcacttatgatgagaaaggtaatttcgccgggctttcagttcctcagtttattattgttaatagggagggaactattgtagaatataaggcacaaagaccaagcaatccggaggaattgaagaatcagttgaaacaatacttggaataatatgaggaaagactcccaaaaacgaaaagctctgcaagaacgaaggttccgtgcagagctttttttactggttagggttaggtttattttattgttttaccttgatgatgtcataattcagatcgctgacagcttcttgcaagctatcgttcaccagacgaagagtggtgtcatttacaatcacgaaatacatcggagcttcaccatccttcggagttaacttaacagcagtaacaggttttttgttcacaaccttgtgtactgtttgttgttttccttttgaagtgaaagtcttgttttgtccttgaccttcagcatcgaggtaagtcatatccagtgtatacgcagtatctacaccgtcagttgcagcgttcaaggttagtacatagtcaatacccggaccgtcggcagcaggaagagtaccttcataaacttcagtcaattcggtaatcggagtcatagcaagagctagactgtctgcttgagcctctgcggctttgtttgcttttgattggcatgatgccaaagcagctacgactgctgctaacataattacttttttcatcgttaagtgctttaagttaatataaatatagtgagctattgctcgttttttgctatcctattcctgctcttcgtcccgtttgatgacaagcagtttgtctactcgtccgcggtccatgtccaccacttcgaattgcagattcttgtaggtgaagatgtctcccgctttcgggatacggccaatcaggaacatggctaatccccccagagtggtgaagtcttccgattccagatcttcataggataaaatccccatttcctccatgaagtcgtcgatgttcattgaagcttccaccagcatcgaaccatcctgccttgtgacgatttcttcttcttccgtttcatcctcttcaaggatgtctccgaagatactttcggtcaggtcgtgcagtgtgataatgccttctgtgctgccatactcgttaacaacaactccgaacttgtttttgttcttcttaaatagctctaaaactttatttgcatataaactttccggaataaagaggggaggacgggctatttcgcgtaagttaaacagctttttactgcctatcatcaggataatatcctttacggaaactacaccgataatctcatctttccgttcgtccaccaacagatatttgctataatgttcttcttcgattgtcttcatcaccttttcctgcgtatcatcagggtgaaggataatgagatctctgcgatgcgtcatcagttcgttagcccgtttgtcggagaagcggaacacatcgcgtatcatttccgtttcctctttgtcaatcacaccctgttccgaactttgatggagaatcattttgatttcctcctgcgtcatggggcgttcttcgcttttcaaaccgatgagtttattcagtagccgggtagagacactcagcaaccatacaaaaggataagaaacctttgtcaggagaatcatgaccgggctgaacaaagtggcgtatcgctccggattactaagagcgatagatttgggtactagctctccgataatcagagaaagataggtaatgattgctacggtagtaatcattgccaggttgcgtgcataagcttctgcgcccggaatgagggaaaagaaaggaacgaggtcgtcggcaatagccacaccaccatacgcaccggatacgataccgatcagcgtaataccgatctgaatggtagataagaacttttccggttcttccaattgttttaaaactccacgggctgatttgttaccttttgcgacaagtgtttcaagacgtgctttgctggatgataccagcgcaatttcatacatggcaaaaatgccattcagtacaagtaagagaagtatgataagaaattccataaatggattaaaatggttatagggtcgaaattacaagaaatcagggcactatgcaaatctatgttatagattaatgattttttaataatagtgtgtccttttttatcaaaaacagaggaggagatactgcggttgacaaaccgcagtatctcctcctctgtttttgatttaggaacgatgtccgttattatttagcgtaggttgctgcttttgcttttgcacgttcgatacgtttcatggtatccgggtgtgacgagaacatcttttgcaggtaagaagcttgtggagcatctttcgacagttcggacaacttagtcagtgagttagccattgcatacgggtcgataccgttctttacacagaactctactccgtaatcatccgcttcgctttcctgcttctgtgaatattgtgcgcctgccagagcttcagccatagctcccagctcggagtcggtcagtttggctactttatcgctgctggcacctgctgcattcttcacggctgaacggagataagcattcttcatggcatctttagaatctgtgtgaactacgtggccaatctcatgtcctaccactgccatcacttcttcatccgtcatcacatccatcagaccggcgcaaatacgtacactaccgtcgccacaagcgaaagcatttacgtctaccacttcatatacaccaaagttaagtttcagtccatccacttctttgatatgtcccgtcaatttctccagacgtttgccatattcagtatcaggtttggtcaatggattatgagcatccatccataccatatactccttactcatgttggcgatgtccgcatcagataaagtaacggctgatactacgtctttaccggcttgtaacgcttttcccaaattaatcttcttgccgaattgtgcagaagctgtcatacccatgcctaacaatacgaaggcaatcatagcgatttctcttttcatactcttttctagtttacagttttatgcataaattaatactcaaatgttattcctaatgtggggagcaatgtcccgctcgattgtttgaggcgtttcattttatagtgttgactgtcggcaggggcttccggattttcgatgataccggtgctcatcagtacatcttgctgtttcagtttgcttaccgtgatattttgcaaatcaagatagaatcccagcatacaatgtttcagataaaatgtcttgtcgatacggaggtctacctgtgcaaaagccggaagacgttctttattatatttagaatagtcgtaatatgctttaccttgtgcatcccaggcagataccagagatgacttttcttcatcataaggcgtataaggagcaccgccgatgcaactgactttcatcccgacactccattggcgcggcagattgtaggttccccgtaagttgaagatataccggttgtcccatgcggatgcaatgtattcactctctttgtcgttgcggtattcgcttttaaataaggtaaaggaagaagccagattcagtttcttggcgatcagccatttcaccagaatctccgcaccatacgaacgtccctgggcggtggaggtcagcaattcgttgccaatcaccccgtagtcattccctttgcaggtaagaggaatgccatctacaacggagagcggaattttatcataatctttgtagaatccttccacggaaacttcgaaagtatctcctttgcgccaactgatacccaagctttcctggctgactttcatatagcggagattgtatttgttgacatacgttccgttattatccttaaaaccgagagccgtgtaaggaggcaactggtaataaagtcctgcatttccgcttaaaaaccagtgatcggcaagttgataggaaagcgatatgcgcggtgaaagctggtcggagagtgatttcatcgccgatgaataattgttggcatccgctctcaatcccaaagaagcagtgaagcgttcgtccatcgaagagtagctgatagtgccgaaaagtccccagcgcatcatccccaaataagtatggtaatcaaacgtttgtgcctgattggtatatgccttttgaaaggtggtgttggtatattggctgtaatccaggttcaatccgaggttgaccttccagttgcggaaagaagaattgttttcgaaacggaattttgtctcttgttcggtagaacggaggcggagcatcagattctccggaatactttcatcattctgacggtatttggtgttgcggttgttcagataactgtggctgactaccaccgattgcacatgcggacctgcataatgacgatatacagcacctagggtaaacgtttcctgcttgattttcggcaggtaactaaggatatattcattgtcctcgctatctgctttcgtattcagtcgcatattatcgatccctccaagtcccaataccgtcagctcgttctgttcgttaaaccgggttttcaatttgaactgcgcatcggtgaaagtcggcaggaaagggaggtcgagcatatcaaacaggaattgcagataagattgacgtacagataccagataagaggtctttttcccgatatgcccgttggaggcgagcgacacttcggatgctccgagggtagcctttacagagttatgctccatatttccgtcgcgcaacttgaaatcaagaacggaactaagtgcgtttcctctatcagtggggaaagcaccagtgtagaaattgacttcacgtatcaggtcggcattaaggattcccaccggaccgccggatgctccttgcgtactgaagtgattgatattgggtatttccactccgtccagataaaaacggttttcagaaggagaaccaccgcgcacaatcaagtcgttgcggtagccgataggcgagaaggcaactcccggataagactgaacaatacgtgaaatgtcccgattagctcccggacttttttctatttcctgcaatccgatgatgcgcaggctgactggactttccagatcgcgccggaaaggagaagcggtgacggttactcctgcgagttcggtcaggttctcttccatttctatcgaaatgttcagatctttggtagataagatatattcgggggtggtgacacttttgtagccgatggcagttgcttgcaggcggtagatgccgggaggcacttgttcgatggtgaaatggccttccgcattggtgacaccacctttgttcagcccaagaaccattacgttaatgaattctaatggctgacggctgtttttctcaatcaccgttccctttatttgatgtacaggttgggcctgtaacagggaaagcaggatgttagaaaatagtagcagtgtcaatagttttttcatgtgattgcgaattattgctgcgaaagtacgaaaaaagtattaaataatgataccttccgtgaataaaaaaagaatcacttctgatttggttcgttttacctgctgataaagttagtcgggttttgtttcacatttcatttttatatcttatttttgtgggacatattaaaacagattccttatgaagactgtaaaattgataacttgtaatgatgcgatgaaggcacatatccttcagggagcgttggagaatgaagacattgagtctattctgcacaatgagaatttctctactttgtataagagttgtgtgagcaatatagcaggagtggatatattggtggcggatgaggactatgaaaatgctgtccaagtgttgagggataacgatagttggccggaagagttgacgctttgtccgtattgcggttcatcggacattcagttggttctaagaaaaggaaagcggtggcgcgctttgggtgccgctatcatttctgcattgatggtcactcctccgggagataaccactggaactatacctgtaaacagtgtcataaaacctttgaaatgccggtttctaaatttaatccttctgcagagacagaggaataattatatctaactattataacacacaatgaaaaagaaaaaactcttattaattgctcttcttttagtatgggtggctccgtcttttgctgccaaagtagataccttattaattaaaagtccttccatgaataaggatgtgcaagtggtggtggtaacgccggatgctgcgttgggaaagaaagctgttgcttgtcccaccatttatttattgcacggttacggtggaaatgctaaaacatggattgacataaaaccgaatcttcctcaaattgcagacgagaaaggaatcatattcgtttgtccggacggaaagaatagttggtattgggatagcccaatcaatccgtctttccgctatgagacctttatttcatcggaattggtgaaatatatcgacgaacattacaagacgattgccgaccgcaagggacgtgccatcaccggattgagtatgggtggacacggagcaatgtggaatgcgatccgtcataaagatacgtttggtgccggtggaagtacgagtggaggaatggatattcgcccgttcccgaagaactgggatatgtccaagcagttgggagaatatgaatcaaataaagaggtatgggataatcacaccgttatcaatcagattgataagatagagaatggtgatttggctatcattgtcgattgtggagaaggagatttcttcctgaatgtgaacaaggatttgcataaccgtctactggaaagaaagatcgatcatgattttattactcgtccgggagcacataatggacagtattggaataactccattgattatcagattctgttctttgataagtttttcaagaaataaatccggaaatacttgactttggcttttcaatgtcgtatctttggatacagaatcataaaatagattgaggttaaactgcgatagaaggaggaggcgaaagctttctccttttttgttatatgctgcggtgacggagaatctcaccccggcttgtagcggttgtaagcccgggtgtaaagacactttagctgccgggggatgggaaatcaggtgttttatctgagtaaatcatacgcttggttaagtgtaaaccgatgctttgttagatgtaaaccaacgctttgtttagtagaatcagacggtctgttttgaaaaggtggaataatgggattcttttgttaatgatgcgtaaatctgctattgacaagaagtgtggtgaaaaacgaaaagaagtgctccccaaaagttatataagaaacttttggggagcacttcttttcattctatttggttcttgctttgcttctatttaatctttagaccgccaccaccgacaaaccgcctacttgcgggactaataacacttttctcaatcttgaattgtgcttttgtagttgtatcttcttctttttccgggggataagtgccttctataacaccgatggctacttttaataatctttcatttgggtcaccgaatggcagaaactcactgtaattagtaactccatcaatggtcgtttcactgattttaagatctgttgcaggtgagatagctcctccggcatcgtgattggaatcataaacagtacatactaccgggttgactgaccacagaaattcttcattaatgaattgttctgttgctacgttttgtccttttgtgacaccaccgatggttacgacaggatagctgtctttcaggaagagacttctgattaacatttccggtgctccagctgttgtactgcttgtgatagcaaacagaccgggcaggtctaaattaacaccgctctttaatatttcactatcaaagttgatggtggcatccttgtccctgtttttattattatactccagataggccatcggcttatttaatcgtacttctgaagtcaaaattgtacctaataactgaacgcagtccaatgaaccaccggcgttataacgtaagtcaagtataacatattttacgcctgctgtcttgaattcttgtgaaatttgtcgcagttcgttattgtacttgtccggatcactgttggtgccggctgtgaaactactgtacatgagataccctactttgattttttggccattctcttctgctggcagtactgtatacttatgtaccggattatcttcaacggatcgtgccgcaggtagttttagggttttgccgttaggtactactttgtacacatattctgtttctccttctcctccttcttccgtatcaacgtttgtttgatcttcctcttctgtcacaggaacttttttccattcacccatcaccaaatcccgggctttggttccctgtagcaattgagtctcgtatttcttgctgatgtaagaagtatcgactttcataatccagtcaccgcgcaccaatccggccgcttctgccggtgaaccgggaatgacgtaagtaattaacgcattataagctgtatcaatatccgcacttcgaactagtgaataatcaaatccataggtaggtaggggagtttccatcacagaatctacaaacgagtaactgtcgcttttcgatttcactttagacaagaacgaggcaggttccaaaaacagattcacatcatcgtaggaaggtagatcttgataccacagatagttctgctgcatgatgtcgtacatccatgtatccagtgcggtctgatgggcatactccggccagcggtcgacaccacaggagaaaaagccactgataaatacgatgctcagggcaggtatgaggattatctttcttaatttcgtcatcataaaaagctttttactgtgcaaatgtaggaaatactttgcttatctaccacatttatggtataaaaatgccttcaatatgtgattggctgttagagattcttgccttatctttgtagcatagaattttttaataggtattagcttacatatagaacgttattaatagacgaatcattattcatggatatagctgcattattatcaggaggtgtcgacagttcggttgttgtacatctcctttgtgagcaaggatataagcccactcttttttatattaagataggcatggacggagcggaatatatggactgttcggcagaggaagatattgaattatctactgctacggcacgtaagtacggtctgtctttggaggtagtggatttgcatcaggagtattgggagaatgtagcggcctatgccattgataaaatccggcagggactgacgcctaatccggatgtgatgtgtaataagcttatcaaattcggttgctttgaacagcgtgttgggaaagacttcgactttacggcaaccggtcattatgccaccaccttgcaacgcaacggtaaaacttggttgggcacagcgaaagaccctgtgaaagaccagacagactttctcgcacagattgattacctgcaagtttccaaactcatgtttcccattggaggtttgatgaaacaagaagtacgtgagattgccaataaagccggattgccgagtgccagaaggaaagatagtcagggtatctgttttctcgggaagataaactacaatgattttgtccgtcgctttttaggagaaaaggaaggggcgattattgaattggaaaccggaaagaaattgggtacacatcgcggctattggtttcacacaatcggccagcgcaaagggcttggattgagtggtggtccctggttcgtagtcaagaaggatattgaagaaaatacaatttatgtgtcccgcggttacggtgtggaaacacagtacggcaatgaattccggatgcatgatttccatttcattactgataatccctggaaagggcaggagaaggagatagacatcactttcaagattcgtcacactcccgactttaccaaaggaaaactgatacaggaaggagagaagcaattccacattttgtcctctgaaaagctgcaaggcattgctccggggcagtttggggtgatttatgatgaagaggcgaaagtttgtgtgggaagcggagaaatcatctgttaaatagttcccttagaggggtagaggttagtgaatagcggtgtcagatatagtattcggctaaatccacaatccctgccctcatcgcatatttagtagcctcgtgcacattattcacccccaatttgcgaaagatattcttacgatggctgttgatcgtatggaaactaagatttttctctgctgcaatctctttcgttgttttccctaatgcaatttcttttaggatattcttttctgtctgcgtcagcaaatggtcgtccatgcttgacgctgccagcggagaagaagttcccgaaagcaacagattgctgacatgattgcaaatataccgttgtttgcgggtggcacattgaatggcagtcatgatttcttcttttgaattatctttcatcactatcccgaaagccatactgctgaacagtacctggcggagaaagttcaggctaagttcgtcagagaatagaatccagtcggcttccttgaatctttcctgcaagacaattaattcatccgccccggcaaaattgaacagtgtataatccaatacaatcaccgcttgcggatgcaatcgtagctgctgaatcagttcagccttgttatcagcttctaaaaggagggatacttccttttgtttacttagcaggaacatcattcctgccttactgatatcctgattgtctgcgatgataacttctctcataagcaatgatgaataaaaaaactccgttacaaatatacgcattttgcgtgatttgtagcggagttatgataagattcttgtatccggattaccaggaacgtcctttgaagatatttgactggtcaagcggaacgatatttccgttcaatgtcaggttattgttgctgaagttcgggctgatgctaactgaagcagtattgtttccgctgctcatattgataaatacttgagcggagatgccgataccctgaacgctgaatgagcagttcacatttccttttttgtcgatattcatcttcatatccgaagaattaccatctactgtaacaccaccgattccgttaggacctgggtaaggagtgttgaaagcagtctgtacggtagctctgttgccgttcatcaagacgaagttggtgtttgaagtaacaaaagcactcataccgttgcggaagacaacttgattagcttccaatacaaattgcttgttcttcaaagcctgtacagcttgttgataggctgccatgtcctgtacctcttcttcggcacggagttttgctctttctgcatctctttgagcttttctttctgcgcggcgtgctgctgcgttactttcttgtgcatacatcattgtgcttgcacttactaatactaatgctactaatgcaataaactttttcataacttttttttgtttaggtttaatacgttgttcgtttattgcaaaaacaaagtgtatgccagattgttcacgaacgtcttgcaattttatatccgatggctgccacagtgatactcattaaggggctgataatgttgaaaaaacaataaggtagatacacaagtgtgggtacacttaggatagtagcttgtgtcattccgcaactattccacggaatcaatacggatgtaacggttactgcatcttccgtcgtacggcttagtaagcaactttcataccctttcttggcataaatatcacgaaacatatttcccgtcagaatgatactgatgtattggtcggcagttgtcagattaagaaacaggccggagcagactgtcgctccaaccacgctgactgttttcttcatgaagcggacgaagatggaagtgatacttcccagcataccgcttgctgtcattgccccgccaaaacacatggcacacagaatcagccaaatcgtattcatcattcccgccataccacgtgtggcgattaaatctgtcagaacggcattgtctgtatgtaaatttgtcgctccatagacggtcatcatcagtcctttgaacaaagaatcgaatccggaaacggcaactccggaaatctcttgcaacaactccggctgaaatatcaaagcaaagacaccagccagcagagtggataggaacagcgtaacgatagagggtactttccgtgctatcagtattccggttacaacagggactattaacaaccacggagtaatatgaaacttttcgttcaaagcggttgccacctccgcaatatgttgtgtattgctggcatcatgggaaagtcctgccactgtgaaaataatcagtgtgatgataagagacggtaccgtggtaatcatcatataacgaatgtgacggaacaggggagtgtctgtgatggaagacgccaggatagtggtttcggataaaggagatattttatccccgaagtatgcccccgaaatgatagctccggcaatccatccatcttcaaagccttgcgcctttccgatacccatcaatgcaataccgatagtggcaatagtggtccacgaacttccggtcattacagaaatcaacgcgcagatgatgcaggtcgatgccaggaagaaactgggatggataatttgcatcccgtaatagattaaagtcggcactactccgctaatcatccaaatgccactcaacgcaccgattatcaacagaatgatgatggctgttgccactccagcaatattgttggtgatggcgagctcgtaatctttccagggaatcttataaaacaccataccgatcaggatacaaatggctgtagtggtaagcaatgacacttgacttccgccgcttagggcatcactgccaaaggtacggatagtggcaaacaataataacaccagtacaacaatcggtatcaacgatacgaggggagagggagcttttttcatcttgattcttataaccttttatttattttccggctactgcttgttgatagccgcgcaaagatacaacaaaaaagaatgaaatcttttgcttcaaaacatcaggtaataaaaattattagatgtttatatttgattggaatatataggagacggctcaactggcaaaagtcttgcgcctgatccaccagtaacggatgaaaagcactcctgtcaggatgagggcgatggataatccggtatagaaaacagaaatgaacgtttcgggcaggaggtggaagctacggatggtgattcccagggaaatcatgaatatcattgtaatccagcttttcacatcgaaaaaggagaacggacaattccggcgttctttcttttgctcgattcgctgggtatgtttatagtagagccttctgaaaaccaatacgaagaataataagaaaaccacggtggcttctcctattttgaacatccaatcttgggaagtgtttaaccaggtcacaattcctattcgcagaatattggcaccggctataatccagacggcaccggctgtgataagtaagatttgtctgttaactccgtatttcattggcgttttattgtaataaacggtttgaccgttcgttttgttgactcatttcttgtagaaaatcgtaattaataaagaaatcccggttaaaacgactccgatactgataactccgtgccagccatacagttgccaaaagctgcctgccagaaatgttcccatagaaccaccgataaagtaagtagtcatgaaaactgtattaatacggttcgaagcacgcggattcagttcgaagatacttgtctggttacttagctgaatacattgcattcctatgtcaatgatgatgataccggcgatgataccgacaaaggtgttttcaccgacgaagaacaacaaccatgcaaagagaatcaaaccgcagccgataaagttgaagcggcgtacacctacccgttttacatatcttcctacaaaagaagctgtcaaagccccggccactccgcaaagtcccagcataccgattacgtcgctgttggcgaagaacggagcttgtcccattttaaaagccagacaggaccacatggcaaggagggaaccgaaattcagtgccgcccgaatcgaataaatgcgtagttgcggatattctttcactaaggctaacagagatttcatcaggtcgctatactttccctggaagttggtttgaatatcgggaaggacttttaatacaacaatcgcgcagataaacatcatgcctgcagcaatgtgatacatttcccgccagccaatcagttcaccgataaatccgctgacgacacgtgaagccagaataccggtcaatagtcctgataagacaattcctacgtttctgcctttatgttccggacgggaaaactgggcggctatgggaatgaatatctgtggaatcatggaacagactcccgtgaggaatgaagcgatgagtatcagatggaagctgtgtgtcagggcaatcgtcaagagggagaagatcaggacagtgaaattgacaaggatgattttctttcgttgatataagtcgcctaagggggtgatgaacaacagtcctgctgcatagcctatttgcgtgaccatggcaatcaggttagttctgaactctgatatgccaagttcatggcgtatcatatttaatagaggttggatataatagatgttggctaccgagacacctgccacaatagcaagcgtccagaggatggatgccggtagtcctccgttttcttttaatgactgtttcatgcggcaaagataataaaataagatgtttattcgatgaagaaagtagtggaaactgtgttgccttctccgtctactgccgtcagggaatgtttgccgggagcgggttgcagggaaattttgtggaaatcctgcgtctgtgtctgataagtgtcgtcaagatgccagaagatagtcgcattggggttgctgtgtgccagttcgaccgtgagaaaccctttactgccgtccaattgtttgggcaacttgatatgggcgttcataggagggtagatgaactgcatggattggaaagaatcttctccacagccggctttgaaaggtggcagtggtttgtattccggatggtgctgcttatagtaccactcccatacaggtggcagggcaaaccatgatttctgaatggtaggttcggtatttgcacagttttcatagatgcggtggctttcgtcagcagatagagtgacgagatgatggtaaggacaagcctccgtccgtaatccggcgggaagaattaatacggtatcagtttcttcacagaaacgtcctttcagatgaccggactggcggcatatttctgcatcaacgaaaacgcctgtgggacgttcgaaccacggtgaagaagggaggtaactgaatatatcgaataatacaggaccggctgtttgtgcaccaaccaatccgggctttccttctccggttgcattgcctacccatacgcctactgcatagcgcggagtcacccccactgcccacgcatcacggaatccgtagctggttccggttttccatgcgatagtttgcatggatggaattgatttccagtcaatctcttcgggacggttgacttctgttaaggcggagagggtgagccaggctgctcctgcattagccgaagtggtttcttctgaatccttttctacggatagaggactggagttactttgttctcgtttttcctgcttgttatgattgcttttatgattacggtttgtttgcttcgtatcattgtttattggctctgtattttctgtttccagtagtatctgtgcttcctttccttgagatacggtcggggaggggctattgctggaaaggcttcgtcccatttgcgcataggcattcgttacatcccataatgttgcttctgcacctcctaaaatcagtgacaaaccataatgagaagccgcccgattgatagtcttgaatcccatctgttgcaacaaatggtgaaacttgggtactccatatctttgtaacatggttacagccgggatattcaacgaacgggcaagggcttcggaagcggggactgctccttcaaactgcatactgaagttttgaggagtaaagccgttgatattaaccggtacatccggtaacagcattttcggtaataaacttccttcctgtagcatggcattgtagagaaagggctttaaaatactgcctgtgcttctgggagcttggatcacatctacctggtttcctccttgtttacggtcgaaatgtacatttccgcagtatgctactacttgattggtgggaatgtcgataaccagaattgccaggttgcggatatcacttcgattaaactcgttgctccaccgttctgccaaactctctatgtgggtttgtatccctctgtcaatagttgaacgggtatatagcccgtttctttcctgatagaaacgactgactaggtggggagctatttgaggaagcggatgcggctcgtcgggtaacggttcgctgacagctaattcataggtggatgcgtcgataatctcttcttcaagaagttgctttaatagacggttgcgtttggaaagcagtgtctttcgtcctttggatagatggatcatggcaggggcattggggaggacagccagcatggccgattccgcccatgataaatcttcggcagaatgaccgaagtaacgccaggcagcagcatccaatcctacaacatttcctccgaatggcgcatgagagacatacatggataagatttcctctttggaagtccgaaattccagacgggtagcccatatcatttcaacgactttctctccgagagttctaggtttgttccgggcgagacgaatggtttgcatggtaagggtacttcctccgcttacgacacgtttgttctttaaattttgatagagtgcccttccggtagctaacggattaactccccagtggtgataaaagtgtttgtcttcaaaggtgatgaggcattgcttgattttttcgggtgttgtctttcggggaggaaaccgccattgaccgtccgatgcgatacgtgctcccaataattcttcatttcgatcagtcacaacggtagagtagggtacatgaaacagttgccggggaaggcaaaagatgtatcctattatcaaaagagtaatgcttatagtcattactttcttagtgacagataatcgtttgaagaattttataggattcatttaaatattaaaagctaagagacatatctttgtgacaaatgattaagtacgaaataataaggtacgaaataattaggcacggattacacggattacgcggtttaagtgaacgagtagaaccgtgaaatccgtgtaatccgtgccaaatattatcggctgacagttgttcttcctgctttgcttcgtgcctgtacgtttacatcatacattgcttcacattgaacggcagggagaataaagttaccggcataggtcgcttgtaacctgacagtgaatacctttgtctcaccgcggcgcagattgaaataggtcaataccctgtcatcacgtatatcctgatagctgtacttgctgactgattgaccggagccgtcggctgctgcgttttccgtttcgggagcaaccattctttcattgtatatttcccaaccggacggtatgatatgcgtcagtgccagattagtgtaatcggaagtaccgctgatattggatattgaggtgatagccataaagtcagttccctgtatgatgtcattgacagagagcggtgtaccgttcaggttagcatatcttatatccatgcggaggttatcgctgatagccggtaacgtatcgtttaataactgcgtacgtgtgataaggtctacgctaagcgctccctttccttgattcttcacagaaacggtgccggattttggagtggtagcgatctctttttcaaacacagctttggctgattttacagcaggttgctgtttatcgttccatgaccacacaaaatccagtgtgcctgacagcttttctgccagacgtcccattgccatcagagcaaaagcggtagattgtgtactgaaccaatcttcttgtgacagattcttagaaacgacttttgcttgttgtaaagcatcccgttcccggttcatcaggatgagtgtttccaaaatcattgcttcgtcacgatcggaagaaccgtaaatctgattcatggaagagtaggggttcaccgttgtttctacattatacacaagttcttcagccggtttcatctttccggtcagtgcgtatgcggctgccagtctccatttggcctgaattgataatccggtctgttctttcattcggttcatagctccatattccggtactcctgccaatgcaagggtatataaacggaaggcttgttgcaattccgactgccattgctgccaaccgcttgcctcctgtggcatacgccagttttgtgcggctgcacgttggaagcgcttccacttgttcagtacattcgcatgaacggcatatcctttttcttgtgccagcgtcaggaacattccagcataagaactaatccattcgtcggcagcagcattccccggccaatatacaaatccgccgttggggagctgacgaccataaatctgccggatagcttcctgtacattcgtctttatcttttcggcttccgtcttatctatcgtcttgaattgagcgacaaacagaagaggcagagccttggaagtcaactgctccgtgcaatggtgctgataattgtataagaagtcgaaccgacggctgatatctaccgaaggtatgcgggatacttccagcttgatctgattatttgtggaagaactgcttaggttgtatgacaattctttgctttgtccggcttctatccattgactgttgcgcagggttactaccggattcggattgcgtacgtctatttcaatggtttctttggtttgttgtccgccgccatttgctgtcaggtggatcgtagcctttccggttttgctgcctgtttttaaggtaaagaagacaagctggtctcccggttgggtgaatttgagcgattgttggttagctcctacaatctgtactcctccaccggatgcctgaagggatacggtcacattcttcacttgattctccatcgcaaagatattgaccggaacggtaatttcttcctgaatactaagcacgcggggcaaagtagacaacatcatcaatggagtccgtacgaaggcagtcttttccgcattgccataagcaccatcctgtccggcaaccaccatggcacgtaccgaacccacatacatcggaagtttcaatgtatgtgtctggctctttccttttcccagatagaaaggacctataaacttgactaccggtttaaaacggtttgctttagcatcggcaggtttcaacgtagcgtctcctcctgtgctgaaaagcgaactgtagcttccggaagaagctcccaatacattatcatacatatcccatgtccggatgccaagcgcttcgcgtgaatagaaatcattccatgggtccggtgtcttgaagttggtaagatccaataaaccgtcgtctacgatagccaatgtataagtcattggtttcccgctcttttcgctgacggtcacgttgaagttggtttccgggcgtaacacttccggcatctgtatctgcggttgcaatactgtctgactgttagtgacaaacaccggaacaacgccgtacatacggataggaaggtcattgactgtttgtgcgtgaggctgtaacagactgatatgcaaatatacgttcggagtcatctccggcgtaatcttgaatgtatatttcgtatctcctccgttggaaacttctatccattcctgacgcaaaactgtcgaaccgttttcaatggataccagcgcacgtcctcccgctgccgcaggaatgatggctgtggctgtttctccaatttcataagaatctttgttcagagagaaagcaagcatcttgatgccgctaggatctgttttgctcgaacgtccgcgccattccggccagtctatataaacggttcctccggtggcatgtccgctctctttgtcttttacgtaaaccaggtagcgtccccatgacggataatcgacgcggaacttgaaggctgcttttccgcctcttgtctgtaagttgccgctggcaacaggtgtgatggaactgttgttgatgtaagtgccaaaagattcaccgctgttctcccaccaccagctccagccgacgcggtatattttgtattccagattagtacggttcactagctgtccctgcgtgtttacagtcacaatatcgaatacgtgatctttgtccgtttcaatatatttgcctttcggttggttcaagttgataccgacgtaagatgtaaatggcgagaacgggattgtttgggtatagatgctggcatctcctcccggttcgaatacacgggtggtgaaagttgcattcaacatacccggtgcttcggttgcggtcggaactttcagtgtgacactggcttttccttctgcatccagtgtaccgtcgaatacatcagttttgatagttgtgaaatccgtagccggattattgaagatatattgtccgtaattcttgaactgtgtattcactttagataaagacatttctattttagctttcaatttggaggcagtggctcctgtcaaccaggttgaagtgagtggagcgtagacatccttgtccgtagcttgaagaatcttcggcaatgccaggtttattttcaagcggttgggttttatggtttcgatacgcagacctttgtggaaggtggttcctcctactttaatatatgcattccagagcccggttggatctgtagcctgtgtcggaacgtcgaatgtataaaatccgttcattccttgcgttgaaatcattttggtgtagaactgtcctctcggattgtatatttccagtgctacgggatgcttgtcggggattctcttttcgcggtcctccaatataaaggaaatgtgcaatgtgtctcccggtcgccatactcctctttcgccatatatgaatcctttcaatcccttttgaatatcttttcctcctacatcgaatctgctgacggactgctcttcaccgtctacgacacgcacgtatgccttttgctttttcgattctgccacgataatgaaaggtacacccttcggagtgatttcaacgaacccgtctccattggtctctccctttcctatgggctgtaactggaagttatatgctgttacttgtgcttttcctatcggtttggtgtccaaaatattgcttacggcaatccatagtttgttcagtgaattccgttttacaatcattcccagattggaagcaaatacattacatgcagcaattcggtctgaattcatataataagatggatggcatggattgtcgcgttccgtccatcggtacacgctccagtccattgttcctccgttgtaataatagtaagcttcgggcgtattccagatggcttcatcttcttcagacaagacacttccgcttactttggtcaacccgtcggatgtattactgtcggcgaatttcatatcctgattctcgtttcctccacaaggataagcggagtattcctgacggaatgaaagtatgacacggtatatggcacccggctcctgatggatcaacccggcaagatctattgagtaatccccccaatgatgaatgtctttggaagcatctttggcaagccataatgttttcttataaaccagccttcctgagcggcgtagctcattggctgaggcgagcgaattggtttgcatgaacatcaatacattattctcgaagatacggatcacactcaaatccacggcatacagattgacagccctgaaaggaataatcagatttttcgaatcgggcaggatggcggcggaggtagacatttctacttgtggtttcagactaacttcactgaacgagatcgtatgtgaagttcccagcgctttaccttgactgtctttgactccttcatggatattcaatgtcagtttattctgcgtgtttgcttcgaaatagatgaagactctgttctcgttaatttggaagatagatgaagagacttccggaatctcaatcagtccttttaaatcctgggtagtggataaaggagcggagaaaacaatctcaattccgttttccggttgttcaatgcgttcggcagacataaaacggaagcaatctttagccggtatcagcacttcttcgctttgtttacggtcgataccagccgggctaccattggctgtaatggttaatgggtaatcatcagcttctctgggtatttgtctgatgttgaactgataccgggtaaggttgtctgtcgcggtgacttctaccggataactcttcttgccatcgctggcagtcagcatcttttccacttcctcttttttcactacatcgctgaagcgtatttctcctttaatatttatttcatccggttgggcagctgtaattggtaacgactccaactgcaaagtgaagttacgttcctgcacacggaatgagaagttgaactcttttagttttttgtccacttcaatgaagtctccaagccggaaagttccttcgtagagcgttcccggtttcaatgctccttcttccggcacaaactcaatggtgttgttgcttacccaatatgcttttccttttaatgaaggggaaaagctgaacggattgttttttaactcactgttcagatccaccatgggttggtcatgggtcaactctatgcgtatggttgaattctgtgaaataactcctcccgtatacgcatttacatacggtgcataatcggcagaaggaatgatgtctttttgagtacgtgtgcatgaatataggcccacagtcatcatgataagtaggagtagtccagtagcactaatgctacgtgtagtctttgttagtcccatagcgatgagtttttttatagttcaacaaacaaatatacagtttttatgctaaatcctttgttattctgattatttttgcaagttcttaatcaatttatttatggggaaaaagaaagaatacaaagatgccaatcgacgatttctgaaaaagctgtcatttcaggaaggtgttttcgcattgccgtgtggaatttattacaaagttttggaaactggtgaaggtacgatttctccgggtgcgcggagtattgttaccgtgcattacaaaggaagtctgattgatggccgggtatttgataattcttatgaacgtacttgtcccgatgccttacgtcttagtgatgtaatagaagggtggcaggtagcacttcagaaaatgcacgttggggataaatggatcatctatataccttatgcaatgggatatggtattaaatcttttgattctattcctgcttactcgacattgatattcgaagtggaactgcttggagttgcatagaggtctatatacgatcagatgcatggatatttttcttttagcttcttcataaaagacttgcttacttgtaaaagttccatttcgttaaatggaggcagcaatatgcaattgttgtcttcaatcgaggtcagatagcctatattgataatgtatgactggttaatctggataagataggggtgcagactcaatatcttttgtgagtttgtatttctttttagtgctaagatatgattgttatttaatacagcttcccatagtttgcttttggagttatatcggaaataaccaatctgttctaaatggattagttgtaagtttccggttattgtagtatataagaagatgtttttttcttgatctttttcagcgttgatgtgattgcaattatcaatattcatattctgtttatcttatgtatataattagtttattgatgatgctaacgtcgtagttttattttgcttcaaaagtaacggattggttttatctgcaaaaataaaaagtgtctcatttcaagaatgagacactttttactattaagaatagtgcttcttaaaaggaggtcttattgttctactctttgattatcaatgaatttactgggtgatacaccatacttctctgaaaagttccggtagaaagtggcgcgggaagtaaaaccacatgcgaacatcagttctttcacgttactctttggattttcggcggctaactgtctgaaatattccagccgaagataattgatgtattcccggaagcccgtaaaaccctgactcttgattgctgctgagatggtatgttcctgttcattcaaagatttggctaaaagttcgatgttataccgttgatcggtatagggatgttgttcctgaagataggtttcaattgttgagaaaagtgggagaggctgggatcttttttcaatttgtgacattatcggttctttcgtattctctgcgttatgaaccatgtctatatggtccgaaaacgggttttcgtagcgtaagtattgtatggagaataggaccgtaaaaacgattgccataataccgaacaggttgaaaacaaattcattgatatttagagtgaacaagatatatatgcctaagaatacgaatagaaaaccgatgaatagatacatatttttattcattctgcggtaggttttgttattcatcatagggtaaatgagaagagcgagcggggtaaaaacagatagaaggaatataaatattctaagttttatgtccatctgatcgatgttcggaatgatttcacctatagaattaatcggagtaatattcccgttaaaacctaaataactgattcctacagttattgtaatgataggtaataataggaaagtgaatactctgaaatggttcagataccctggcgataaagaagcaatagggaataaggctacgatattggctaatgcataccacttgagcattttctcgatgttgagtaactctgtgaagttgtattccggggtgtctgtgacaattgtcagccatccgatattttcccatgaaaacatgataccgataccggtagctatgattccccaatataatttcggataattgtctttggcgcgtatgataagaatgatacctatgattaaagctatcagatcgagtgtaagttcaatagacaagtgtattattcccatatttctgatgtgtttctattctttgcagtatatacgtaggtattttcttttgcaaaggtagtcaaaaatagaaatattcggtaataaaaacacgcagctttggagaaagttagtaatgctgacctttcttatatttcctttatttccttagatgaaccatcttctgccagttctttaatctctttattcaaaaacacagaaagtacagttcttactacaacaactccgcccaagattgccagctcatccaaagtaggatcaactacagttttcagaatgtcggatgcgattagaaattccagtcccagcaaaaggtaactgccgaaatctgctctaagctgccggatattattaatggtataagttccgttgaaccgttttatctcattgcgcaggaaggcaacgaaaccaacgagcacaccataggtcacaatcagtagactgatgacactgatgatagtggcgagtgtatttaagaatgtgagtagcattgttgtataatgtttagtatcttttatataaacaagtgaagttgtatattagttctcaaatagatctttcgttaggattgagttctcaatctaatttgtgtatcaataaaatacaaatctccatctattccataaagtacattattggggacagcgtcaaacacttcgtaatcattattatgaaattcatctatgtagtccatttcaaaaccaagtgcttccatataaacaataatttcatcttctgtagcttcacgttctgctaatatataaggttgtgtgaggacggcgcagaactcttgttggctgttataagagaaacctatcatctgatagggaacattgccaaagaacttgttgtgtgcagcaatgcggatgaagaagttctccaaatcatcgcctgcgtactcaaagttgttcagctttacaactatatcttcatttcctgtgtagacttcattttctccacctttacttaagaattctatattcaaattagagggggaaatccataaatcgtctgaattggcaaatgaaattaactcttcaatttgccttctcttatagctttctgttggtccaaacgttcttgttgcttcttcttttcttctaatgaggctggctgcttgctccataatgctattgacttgcgagtacgctctatccattgcttgtgaaattcgttgatgtattccataatttaattgattatgagtttatgcaaatatagttatttggtttatttccaagaaaatttagttgataaattgtatttattttattcgctattaatgtgaagtagactttaatatcatgtctttccttttgaaattaataatggaatgtattctttaatggttccaatagtctttttgtgaagaatatgctacaaaaatatagtctagattaccacagataaatgtgaatttattagttgaaaacgatttactttgtacgttataaacttacattataaataaatggataaagaacatatttcaagagatgctttttttgcaatctatgactttttagataatgataatgggccacgatgtcttatagatgaattagatggtttcagatactatttttgtagttcatcttggattgaacgtgctacattagatgttttttcaaatggagtttatttgggtgaagttgactctaaccacagaagacatgggattggtgtatatgtttttaataatggaggcatttatctgggagaatggtctcagggtgagagagatggtaggggcttttattattccggcggacaagtattctggggtgaatggagtgccggagaaaaggacggaagaggacatatttggcaagtgaactacgaatcggaagggatttatgcaaaaggacgcgagaaaaccaatatgtatacacgaactccacaagggtataaacgcggaggaaatagtaatagtagttctaactcttctggtggctgttgcggattaatcgtgggaggaattataatctttatgatattgaaatttataggttgcatagattgaaaatgttataataatatgatacatttctttgaatgtatgaaagagtaaatgatattcattaaggtgtgtttttcttttcattgttttttagttcttccaagtaatagttgaagaaattatgatttagaatatgggaaatgcgtaacaataagtcggagtctatgctggttcgtttgaatattttgtatacattggttctatcgcagaataatttattagcaaaccacgttatagagcgttcctgacggtgtaattcatcttctattatttggccgatatgtatcatataacaatgtagtttgttagcaatgttcttaatatagtagtttgttttactttttacaaagttatgtctattttgttttttaaagatggttgagcgtggataataaatcacataaatgtagttgaatattcacgcatttttaacttgacgcttactataaaacgaaatatggtgtaattagacgaggtgcagttcagttccaacttgttgaggaaatctaaattcttccatttagtgcctttttctgcactccccttttcgtatttgtgctgccagcaatcatatgccttagaccaataatggtttatttgaactttaatatcctttttgtgattgaccttatgcatattccaaataacgaacttataaaatgaattaacgggaggaattgttatattatgccattttacattgaatccatgcatagagaatggttgttcgtttatgtcgaatagagtgttgtagaaaacttttccttctgtgaaatatttttttctacatacgtgatattgttctataactaatcgtgtgtaatcgtggtgtagtataccggaagtgccgaaaagtttccaatatatcatgacaacaggataaatttcataatgtgcaagtaagttatgaatgttggattctcttaatggacaaataaattcatcaatgtcaaggaaactgacccattttgtttctgtgcgataatgtttataccaatgcatataagcagtgttttgcccaggattatccggccattcatttagtgtcactattcctgatttaatatatggggatagtacttccatataattgtcagtagaattgttttgataaaggtaaaaatgatctatacctaatgtcaaatgataggttagccactcttgtaaaaacggagcttcatccttaaaaataagcacaagagtagtttgatatttatagatcgttcgttttggggaggttattttatgtatgctttttaatagaatatgataaaaaagatttatgaaaggatatagtatgttttttgcataatagaaacgtctgggagtctgtatgcaatattggaaatttgtatcttcttgaataattttcattgaaattgctactttttagggtgtaaccgtcaagttacaccctagagaaagtgaataaatcagtctcctactatgcccgaacagttggtgcaccaagaacaatgtatagttacgatgttcttgttttcaacttgttcgtctagttgtgaagcaataattcctttggcctcttccaatgtctgataatcgagtacttctttcatgtcgataaaaattaaattaaacaaaaccgtaattgatatattacgaaatttaatgtctagtattcaattaaaattgaatacattgttatgtactagttcatagcatttaatagcagcttttagttttaagacttcgtttgctgttaaatgttctttttttgctatataatattgaatctgaaagctggatatgacttgagcttctgctaattgcatcttgcattttgataggtttctattttgagggtttcctctgtctatctgattatagccataacaagtacgacatatattggaaatcaggcattttctacatttgtcatttattaaactggcatcatcatgaaaatcaatatcttttaaaattctctctacctcattttgcccatgtacaataggtaggaatagatgacatggataggagattccgtcagtatcataaatcaaaatatccgttccgacaccacagttttttggggggatatttaaaggagatagcaatttgctgaaagagtaatcaaatggctgatctggttcaaattccgggtgttttaagtagaatcgggcaattttcatcaattcattcttgtaaatggtagcatcttcctggttccatactattccttctgccaatgaactgggtactttatatccttttaggcttaaatcgataattcctttggaataataaggtaatgtctcttgagaaacggtcattttaaagtatgagtttttccagttctttgcaatataatcaatggggatttttttgaaatcacatccccggttgatatactgcatataatcatcaccatcaatcgaaacgacaattctaaatccttctattctttctgcaaaccagtgtagcatattgtcggtgaataatgttccgttggtggtgagctggaatattaaagggaatgtcaagtttaaggagtctgtccattcgtaaatattttgaattaaatcaaagtttaataaaggctctcctccgaaaaattcgatcgctaatctgtctgaaggtagacggtctttatttgaaaagtcttcaaattctttgtttagaatcttttgggctgtgtttaaagacatgaattttagccctttcgatttgtatttctcaaaacagtatacacaatgaaggttacaactatgtgttaccattaaagaacaaattcgttttgtcgtatattggggattcgctgtaatcattttgttttttgttatagagtaagtaattgatcttgataaatacgattaatagtttgtatatttagtatttgggtggcaaactgaataacccgtttgtaatggcaagaagactttataggacagttctcacaatcaaaacattcaggaaataaatagtttttcatgattttctgagtgcttttaaaatcagagaatacctcatctactttttttgttgtataaaatttgcttaaggctgacctgatattaacatctttctcatgattttttttgaggtatatataatcgcggacacaatgtagatagtcgttatatcgggcttcttttgatttatagaaatctaagaaagaagtaaaatatttatatgctctctcgtagtcattgagttttatgtaaatcaagaaaatgagcaaatctttatttattacattgtgagaggaagtgttgtaggggaataacttgattaaatattcatcaggatatttctcctcaatgatagttggcaattgttccaattcttttttgtttaattgtttgagtctgtataatgaccatattggcttgttgctattcaaatattgtatatagtcatctaaaatatcattgagtttgtaatgttgatcgctcaaccctggtattatgatttgataggtggggaaaccaagaaaagagtgatctcttattaataatgaatacccatttctttctaaaaaatcaaccatagcatgaaagtcatcctggctatctcctgttcgcgttatgacgggttcattaaattcataagatggagatgcgaagaaaaactctgtcggatagcgaccagttccattctttagatttctatgatactctttggggatatttatcggtttatctaactctatcggggtaaaaaaagcatctttttgttctcgcccttgaaaaatttcagtaaaacatctttctaatgctatttccggacttagatctgcacctagtctgaatgttatagtcccattacttgtatttgttaattgtaatcctattacagggaagccttttcctaaagagcagtctctaacttcataaatatatcccatgtctacaagtttttctaatctgctgtgtatagcagttcccttaaagtagtcaggggagtatacaggtggtgtaattttttccagatatagtttttgtaggacatatctttcaaatatttcgtttattccttgtaagattgcttcgtatggggtatttcctgcacacatgcctgtagagctgttggcccttaaaagaatgatggggacaacttctacctgttttttggttatattggcaaatggtactcctagccaggatatttgttccggtaatttattcgcgtaacgctttggctgatagttcgggaaaaaggtgtttatcagtgatataaaattagcttttgaagaggtttgttctttttcatcgggaaatagctggaacgtactgctagggattgcatgtttgatggcttcattcaatagtgatttattttgtagacgttccattaactctgcgtagccactggctaatgaataagctggagtcatgcctttcccatttgttcctacatttaattcggacagaacatcattgtttattataattctgcaagaatgagataaataggcattgttatataataattctttagtgtttatgccaatatcttttaatatgttttttattttctggattgtttgttctggagaggcatctttatattctaatgtcatttttgattgaattttgataaattattaatgaggcaaatataaagggaattagtttgtgttttgtataatggttgtgtagtattaatcacgaattcgtgattaattttctacacttgtttagttcataaagataatggataaaaaagttgtagtttaaaattagggaaatacgaagtaataagtctgtatctatactttgacgcttaaaaatggaatacacattactacgatcgcaataaagtttgtttgcaaaccatgtaactgaacgttcttgacgatgaagttctttttcaatgagttccccaatgtgtatcataatataaaaaggcggaaccattcaatacttattttcaatctgaggtaccgccaagcaccaagtccataaataagtaagaatagttcgcgcccataaagcacaaactttcagttactcattctcttggacttcaaattggcggttttcagattgagagaataagagctaaaagctcaagtatcttttaataaatatagaatggaaacgctattccaaaagtttttgtttttaaataaaaataggagagtgctgtattgagcactctccttatgtataaaagtaataaattacttacccaaagcctgagctacgtctacagcacaagccacagtacaacctaccataggattgttaccaattcccaggaatcccatcatttccacgtgagcaggaactgatgaagaaccagcgaactgagcgtcagagtgcatacgacccattgtgtctgtcataccataagaagcaggaccggcagccatgttatccgggtgaagagtacgacctgtaccaccaccggaagctacagagaaatatggtttaccagcaagaacacgttctttcttgtaagtacctgcaactggatgttggaaacgagtcgggttagtagagttacctgtgatagatacgtctacaccttctttccacatgatagctacaccttcgcgaacgtcgtcagcaccataacattttacttttgcacgaggaccgtcagagtaagcgatttcgcgaacaactttcagttcacctgtaaagtaatcgaattgagtctgaacgtatgtaaagccgttgatacgagagatgatctgagcagcgtcttttccaagaccgttcaagatacaacgcaacggttctttacgtactttgtctgctttagcagcgattttgatagcaccttcagcagcagcgaaagattcgtgacctgccaggaaagcgaaacatttagtttcttcgcgcagcaacatagcagcgaggttaccatggccgataccaaccttacggtcgtcagctacagaacccgggatgcagaatgcttgcagaccgataccgatagcttcagcagcttcagcagcgtttgtgcagtttttcttaagagcaatggcagtacctactacataagcccattttgcgttttcaaaacagataggctgagtttcttcacacgttttataaggatcaagtccggcagcttcgcagatagcgttagcttcttcgatgtctttgatgccgttagcgttcaaggcttcaatgatacctttgatacgacggtcttggctttcgaattttacttctctaatcatagttttctttcctccttatattattcgtgacgtggatcaatagatttaactgctccctgttctgctgttacgcgtccataagtacctgtaactttcttcaaagcttcgttagcatcagtacctttcttgatttcgtccatgaacttacccatgtgtacgaattcgtatccgcagatttcgtcgttcttgtccaagaagatttgtttgatataaccttctgccatttcaaggtaacgaggacctttagccaaagtaccataaagagtacctacctggctacgcagacctttacccaagtcttccaaacctgcaccgataatcaaaccaccttcagagaaagctgattgagtacgtccgtatacgatttgcaagaaaagttcgcgcattgcagtgttgatagcgtcgcaaacaaggtcagtgtttaatgcttcaagaactgttttacccggaaggatttcagaagccatagcagctgagtgagtcataccagagcaaccgattgtttcgatcaaggcttcctggatgataccttctttaacgttcagtgtcagtttacaagcaccttgttgaggagcgcaccaaccgataccgtgtgtcaaaccagaaatatcaacgatttctttagattttacccatttgccttcttcgggtatgggagccggtccgtggttaggacccttctttacaacacacatgtgttccacttcgtgtgaataagtcataattagctctttttttaagtgatataattaaaaatacgtagtcacgattctctaaatcgcccacaaaggtagtcgatttatttgtttctgcaaatcgccttttattacttttttgtgaaaagagacaaatctgtttacgttttttcgtcgtttgtaaagtcgggattgcatttgtgaaagattgagaccgcgagaactatctatcctgtgctttgttgttattagaaaaagaaaatttatggaactgaatcagatagatatacattatttaatagcggcaatttgcgttatttcatctgcgcttgtgttttatacgataggtgtttggggagaacgtcttcaaaggaaattaaagttttggcatatcattttctttcttctcgggttgctggccgacacggtgggtacaagcctgatggagcatattgccgaactgactcatctgcatgacgaaatgcatacggtgacaggggcaattgctattcttctgatgtttgtacatgcgttatgggcgatatggacctatgtgaagggaacgcctatagaaaagagacattttaatcgtttcagcattgtagtttggtgcatttggcttataccttatttaataggagtttatttggggatgcgattacatgtataataaatagcctgaatagagccggctattcataaatcaccttacaatattcttgtcggctgactatagccggccattcagacaactatcgttgtctgattagccgactggagttgactggatagccaactggagtcgtctgttattaaacagttgctttccattcgggatatatatgctatttgcctgtttctattaatatagcaagtattggttctcactatgtggtgaaactgtgaaatacatattctgtgaaggatgtgaataccgtgttttatataatttgttcacaggaagtgtctgtaaatgagttgatatgcgtcgtgtgaaggcagtggaggatagataatgaagttaagacaggtaagattgtggaaggattattactggatgtagaataaaattcgtagctttgctgcataatttatataagaaagttatgatcgaagttgtagaatctactttgcaaaaggctgcgggtgaaggaatggatgaatttatccaggcgtttacagataaatataaagagattatcggtggcgaactaaccgctgaaacaatgcctctgctgacaggggaacaacattctttgctggcttatcagatttttcgtgatgaggtgatggcggggggattttgccaattgattcagaatggttatggtggttatatatttgataatccgtttgcgaaagtgatgcgtttatggggagcggaagagttttcgaaattagtttataaggctaagaaaatctttgatgccaaccggaaagacttggaaaaggaacggacggatgatgaatttatggctatgtacgagcaatatgaagcttttgatgacttggaagaagcctatttagaaatggaagaacaggtcacagcattgattgcaagctatgtagatgaacatttggaactttttgcaaaaataataaagtaacggatgcagtattttttaagtacttgcatttattaattatgaattagaatttatatctttgcaaaatctaaaaaatatgtttatgaaacaagtgaaatttttcttggtggctttgatggctgtggttatgggtatgtcagttacttcttgtatgaatggagatgataaccacaatgttacaatgactgttcctgttaagtataattattcatcatttttgatgggtgatggaactactaagttggttccaactacagaattaggtttattggatgggactatgtttataatttcatgccaatatgaccaatcacaggtgacagcaaacagtactagtataccagttactttgctatctactccgctttgtattgaccctaaaggtaatgaaactttgactcaaacaaaaacggaacctactaatcctctttattcattggataagcaacagtcaagtttagtttattatgataaaaatacgattgttttgacaatgccatattgggtgaaagttacaaactctagtgttgaagattcagaagtaaagaaacattcattttgtctttcctataatcctgatgaaatagaaagcaatgctactaagttgaatttatatattagtcaccgtgttgaggatggagaggaaagtgtaactcgttccaacttcacatatgcttatagagcttattcaatcagttcagctctttatcagtttaaagagaaaacaggtaaattgccgcaatatttggtgctaaaagctgaaaccaatagctcaaaagatgaattgaaagacgagaatggggaaacttcggttgaatatcaatatgcatttacagaataacattgaattacaaggaactatttaacatagcaatgaaattgatttcctctccggccaaggcctgggaggaaatttctatggaagaggataggcgaaaagtatatatggcttttgtctatcctatgattggtttatgcggtctgtccgtattcatcggttcgttattgacgaatggatggggaggtccgcaaagtttccagatagctatgaccaattgttgcgccgtagctgtagccttgttcggtggctattttctggcagcttatgccatcaatgaaatgggaacaagaatgtttggcatgcatagcaatatgccgttgacacaacagtttgcaggatatgcattggttgtgtctttcctgcttcagatagtaaccggactattacctgattttagaattattgcttggttgctgcagttctacatcgtctatgtggtatgggagggagttcctatactgatgggagtagaagaaaaacaacgattaaaatacacccttttgtcgtctgtattgttaatactatgtccggcggtgatacagatcgtgtttaatagactgacggctatacttaattaatgagtaaagatgaaacaacctcctgtaaatataaagaataaacgggctacgtttgattacgagctgatagatacctacacagcaggtattgtattgaccggtacggaaataaagtccattcgtttgggaaaagccagtctggtagatacgttttgctattttacgaaaggcgaattgtgggtgaagaatatgcacattgccgaatatttctatggatcgtacaataaccatacggcacgtagagagaggaagttgttgcttagtaaaaaagaattggagaaacttcagcgggagatgaaaaatcccggctttacgattgttcctgtacgcttgtttatcaatgaaaaaggtttggcgaaactggtagtcgctttggcgaaaggtaagaaagaatacgataaacgagaatctataaaggagaaagacgaccgtagagatatggcaagaatgttcaagcggtaagtaaaaccgctataagataaacaccggactgcgaagagtctggcagaagatggcagagtaggtaattaggtattaatgtgatagggtaatgaaaaagacaatttctcaagtcgtatccgagcgcatccttattctggatggggcaatgggtacaatgattcaacaatataacctcaaggaagaagattttcgtggtgaacggtttgcgcatatccccggacagttgaaagggaataacgacttattgtgtcttacacgtcccgacgtgattcaggatattcatcgtaaatacttggaagcaggtgcggatatcatcgaaaccaatacattcagttcgactacagtttctatggctgattatcacgtagaagaatacgtgcgtgagatgaatctggcagccgtaaaactagcccgtgaccttgccgacgagtacactgcaaagaatcccgataaaccgcgttttgtagccggttctgtgggaccaaccaataagacttgctctatgagcccggacgtgaacaacccggcttatcgtgctttgagttacgacgaactggctgcatcctatcagcaacaaatggaagcaatgctcgaaggtggggtagacgccattctgattgagacaatctttgataccctaaatgccaaagctgcaatttttgctgccgaacaagccatgaaaatgacaggcatagaagtgccgatcatgttatctgtaacagtgtctgatattggcggacgaacattgtccggacaaacattggatgcatttctggcttctgtgcaacatgccaatatattttcagtcggtttgaattgctcattcggtgcccgtcagttgaagccgttcctggaacagctggcatcccgtgcaccttattatattagtgcctatccgaatgccgggttaccgaatagtctgggtaagtatgaccagacacctgcggatatggctcatgaagtgagagaatatattgaagaaggattaatcaatattattggtggctgttgtggtacgacagatgcttatattgctgaatatcccgcccttgtagaaggagctaaaccacacgttcctgcctctgcgccggattgtatgtggctctccggacttgaactgttggaggtgaagccggaaataaactttgtgaatgtcggcgaacgttgcaacgtagccggttcgcgcaagttccttcgtctcatcaatgaaaagaaatatgatgaagccctttctatcgcccgccaacaagtggaggacggtgctttagtgattgacgtcaatatggacgatggattgttggaggcaaagacagagatgactattttcctgaatcttatcatgtccgaaccggaaatagcccgtgttccgattatgatcgattcttccaaatgggaagttattgaagccggactgaagtgtcttcagggcaaatcaatcgtcaattctatttctttgaaagagggagaggaagttttccttgaacatgcccgaatcatccggcaatatggagccgctgctgtggtcatggcgttcgacgagaaaggacaggcagatacagccgcccgtaaaatcgaagtttgccaacgggcttaccttcttttggttgacaaaattggttttaatcctcacgatattatttttgaccccaatgtgcttgctgtagctacggggattgaagaacataataactatgctgtagattttattgaagctaccgcttggataaagaaaaatctccctggtgcacacatcagcggaggagtcagcaacctctctttctctttccgtggcaacaattatatccgtgaggccatgcatgcagtgttcctttatcacgccatccaacaaggaatggacatggggattgtgaatccgggaacttccgtattgtacactgatattccggctgatgtcttggaaaagatagaagatgttgtcttaaaccgtcgtctggatgcggcggaacggcttatcgaattagcggaatctctgaaagcaaacatgagcgaaactgccggacaaccggctgtcaagcaagatgcctggagagaaggaactgttcaggaacgtttgaagtatgccttgatgaaaggaattggagattttctggaacaggacttggcagaggcattgcctctttatgataaagctgtcgatgtaattgaaggaccgctgatggatggaatgaaccatgttggtgaactgtttggtgccggtaagatgtttcttccccaggttgtgaagactgcccgcaccatgaagaaagccgtagctatcttgcaaccgatcattgaatcggaaaaagtggaaggaagtgcttcggcaggtaaagtgctactggcaactgtaaagggggatgtgcacgacatcggaaaaaacattgtagctgtagtgatggcctgcaatggttatgatattgtagatttaggagtaatggttcctgcagaaaccatcgttcagcgtgctattgaagaaaaggtagatatgatcgggttgagtggactgattactccatctttggaagaaatggctcacgtggctgttgaacttgaaaaagcaggtttggatattcctcttttgattggtggagccactacatcgaagatgcatacggcattaaagattgctcctgtttatcatgctccggtagtacacctgaaagatgcttcccaaaatgcaagtgtcgcttccaaattgctcaacccgcaggcaaaagccgagctggtgaatgaattggaaacagaatatgaagcactccgtgaaaagagtgggctgatgaagcgtgaaactgtttcgttggaagaagcacagaaaaataagttgaacctgttttaaacattgtcacaatgaaaaagattttctctttcttatgtctgattgtagcagtcactgctatgacctcctgttcttctgcaaaagaagaaaaaggaacatccggaaccggaaatgctgtgttggataatattttcgagcgcaaaagtgtgcgtgcttatctgaataaaggagtagagaaagagaaaatcgactttatgcttcgtgccggaatggctgctcctacgggtagggatatccgtccatgggaatttgtggtagtatctgatcgtgccaaactagattcaatggcagcagcacttccttatgccaaaatgctgacgcaggcccgtaacgccatcatcgtctgtggagattcagtacgctcgtcatattggtatttagattgttctgcagcagcacagaatattttgttggctgctgaaagtctgggattgggtgctgtatggacagcggcctatccttatgaagaccgtatgcaagtagtgcgtaaatatactaacctgcccgataatattcttccgctttgtgtcattccttttggctatccggctacaaaagagaacccgaaacagaaatttgacgagaaaaagatacattataatcagtattagtaaacaaaagttttgtcttttcaataatttccttacatttgcgtccaaattgattaaaatctgatacgcaaatgtttggaatagacgacccttttattattctgccttacctgctttcggtggtatgtgtgatttttgctgcctggtttgggctgaaatattggaataaggacgacgaaaaagacgaaacccgatgaatacatttactcttggactaattgtggtagcttatctgctgtcactggcctacctcggctttttgggatataagaaaacaacgaataccagtgattatttagtaggcggacgtcagatgaatcctatcgtaatggcactttcttatggtgctacgtttatttctgcatctgctattgtaggttttggaggagtggcggctgcttttggaatgggtattcagtggctctgtttcctcaatatgtttgttggggtggttatagcttttatctttttcggtttgcgtacccggcgtatgggggcgaagttgaatgtgagtactttccctcaattattaggccgtcatttccgttcccgtaatatacaggtatttattgctgctgttattttcatcggaatgccgctttatgcagcggttgtaatgaaaggtggagccgtattcatcgaacaaatctttcagattgatttcaatgtttccttattgatatttaccttggttattgctgcttatgtcatagcagggggaatgaaaggagtaatgtatacagatgctttgcaaggagttatcatgtttggctgtatgttatttctgttgttttctttgtatcaggtgcttgatatgaactttatcgaagctaataaagaattgactgccattgctccgctagttccggaaaagtttaaagcgctaggacatcaaggatggactgcaatgcccatcacaggttctccacaatggtattcgctggtaacttctctcattttaggagtaggaatcggctgtcttgcacagccgcagttagtggttcgctttatgaccgtggagagtagcaagcagttgaaccgcggtgtatttatcggttgtttctttctgattataacagtaggggctatctatcatgctggagccttgagtaatcttttcttcctgaaaacagaaggagcggttgctaccgaagttgtgcaggatattgataagataattccatattttattaataaagcgatgcccgactggtttgccgcactctttatgttgtgcatcctttcagccagtatgtctacgttaagttcgcagttccatacgatgggtgcttcggtaggctctgatatttacggaacttataaaccccgttcacggaataaacttaccaatgtgatccgtctgggcgtattattctctatcctggtcagctatattatttgttatatgttgcctcatgatattatagcccgcggaacttctatctttatgggaatttgtgcagccgcttttcttccggcctatttctgtgctttatattggaagaaagctactaaacaaggtgtcatggcaagtctttgggtgggaacaatcggcagtctgtttgctcttgtgtttcttcatcagaaagaatctgaagcattaggtatctgtaaagcgttattcggacgggatgtgttgattaccacttatcctttccctgtgattgacccgatattatttgccttaccattatctgtattggctattgtcgtaatcagtctgatgacctataggaaataagtattaggtattacacctaatacttaatactttatctcatgcttttattttctttttgtaggattcgtagcgcgacataatatctcgaacgaaattgtaagtctcgatgccacggaaatatccgtttttgcagacaggatcgttgaagtattcttgattgcttttaagcaagatgaagttttctacattatctttccatactaatttgtttttcccgtatttttcggctagtgccattgcgtcatatatatgtcccaaaccggcattgtaagatgccaggataaaattgagccgttcctgcttatcgggaatcatgctgaaactccggtcggtggcagtaatatatttgatagccgctttcacactttcctccggattctgctctttgccgggaggtactcccattgcacgtgctgtggcaggcattaactgcatgagtcctttggcacctgcccaagatacagcggtagtgtcaaaattggattctgtatacgctaatgatgcaagcatgcgccagtcccagccgatgtctttggaatacttcttgaataaatggtcataatgagatatctttccttcttttaaggagaggataggagagtgcggcatcattttactattctcaaaataacgtttcatactcgctgtgtaagcaggagaagtcatgttttcctgatgccattgggtagcagcggctgcgagctcggggctgtcttttcgtaccgcccacgaagaacgttgatcgaaactgatggacaggccgatatttaaattgggataataggtcttattaagtctggctaaatcattgtcggccaccgtatacagaatttttccttgcgctacttgcgtaatcaagtcctcaatagtgatactgtcattggtgacttcatgaatccggatacctcctcctaattcactattcagattgacgaggcggtcataatatttccttggttttacgtatatatcttttccgaccagttcggttacatctttcaacggcttctgttttcctcttccttgctgaacaattacctggtgagtaattacatcttcgccacaataaagaagactgtctttccactctttggtgattggcagattataggcaatcatgtctccttcacctgccaataatttttggatcatttcgtcgacgctgttggctacttcaatcctaagttttagtcccaggcttttggcaaactgttcactaagttcatattggaaccccatttcttgtccccggtaaatgaaataggaagtagagctatataatgtcaatacaacgagttcgccactatcttttatttgtggaagatcacgcgctgtctcatccatcttgttatgatgcttattccggcatccgagcatacaacaaaatagaataagaaataaaggaatactcagtgtcttgacattcatttcttaatttttaatttttaattcttaaggtgcttcttgatgtacatagtcagtatatcaatagctaccctattactgcctccttccggtacaataaggtcggcatatcgtttgcaaggttcgataaattgcaggtgcataggttttaaaacccgtgtatagcgttccattacagcttcggcagtacgtccgcgctcaatgacatctctctgaatgacacgaatcaggcgttcgtcgggatcggcatcaacaaatattttgaggtccatcatattgcgcagctttttatcacataaggcaaggattccttcaatgataaccacctcacgaggttcgatatgaatggtttcgggctggcgcgtgcatgtgagataagaataggtgggctgttcgatactcttcccttctttcagcgtcatgacatgcttggatagcagactccattcaaaagcatccggatggtcaaaattgatattctggcgttcttcaaccgggacatgactactgtctttgtagtatgaatcctgtggtaagagtactacttctcctgcggggaggctttctataattttccgtacgacggtggtctttccggagcccgttccgcctgctattcctataattaacatctctttaaatgtatatttgaaccaaatagagtatttttgcattactattaatgtggtaaacgcattaacaagacaaatatagaaacaattcattaaaataacaacgtaatggtaaaacacattgtattatttaagttaaaagacgaagttcctgctgaagggaaactggaagtcatgactaaattcaaggaagcgatagaagctcttcctgctaaaatttctgtaattcgcaaagtggaggtcggattgaatatgaatcctggtgaaacatggaatattgcgctttacagtgagtttgatacactagaagatgttagattctacgcaacacatcccgatcacgtagctgccggaaagattctggctgaaacgaaggagagccgtgcgtgcgtagactatgaattataaaccccaaaaataaagatgagaaaaataatttctttcctgcttttaagctttgttgtatatgcattgcaagcgcagatcaaagatccggtaaagtttaaaacagagctgacagctctctccgatacggaggcagaggtggtgtttacagctaccatggataaaggttggcatgtttattctaccgatctgggagatggcggccctatttccgcaacattcaatgttgataataaatcgggtgtcgagcttgtaggcaaactgaagcctgtaggcaaagaagtatctactttcgataaattgttcgaaatgaaggtacgctatttcgagaatacagcaaagtttgtgcagaaagtaaaattcacgggtggagcttacgcaatcgaaggttatctggaatatggagcttgtgatgacgagagttgtctgcctcctactcaggtgccgtttaagtattccggagtagcaaaagccggaaatgccgctgcaacaaaaacagagcaaccggagcaaaaggtagcggataagcaaaaagaagaacccgttcctgctgctacgaaagattcttctgcgatgatggaactggtgcctgcaactacaaccgaagctgctacggatattcagcctgctgttgcatcgggtgatctttggaaaccggtaatcagtgatttacaagccttaggagaagaacatggtcaggaagacatgtcctggatatatatattcataacaggttttctgggtggattattggcattgtttaccccttgtgtatggccgattattccgatgacagtcagtttcttcttaaaacgtagtaaagacaaaaagaaaggaattcgtgatgcgtggacatacggtgcatctatcgtagtgatttatgtggcattgggcttggctattactttgattttcggagccagtgcattaaacgctttatctaccaatgctattttcaacattctcttcttcctgatgctggtgatttttgctgcttcattctttggagcgtttgaaatcaggctgccgtcgaagtggggaaatgcagtagatagcaaagctgaatctacgaccggattgctaagtattttcctgatggctttcacgctttcattggtatctttctcttgtacaggtccgattatcggcttcttgctggtacaggtatctacaacaggaagcgtagttgctccggcaatcggtatgttaggatttgccatcgctttggcattgccgtttacactcttcgccctgttcccgtcttggctgaaatcgatgccaaagtccggcggatggatgaatgttatcaaggttacgctgggtttcctcgaattagcatttgcacttaaattcttgtcagttgctgatttggcttatggttggagattgcttgaccgcgaaacattcctggctttatggattgtcatctttgctttgcttggattctacctgttgggcaagatcaaattcccgcacgatgacgatgataataaggtgggagtaacccgcttctttatggcgttaatctctttagcatttgccgtatatatggttcccggtttgtggggagcaccattgaaagccgtatctgcatttgctccgcctatgcagacgcaagatttcaatctgcataagaatgatgtacacgcgaaattcgatgactatgatttaggaatggaatatgcccgtctgaacggaaaaccggttatgctcgactttaccggatatggttgcgtaaactgccgtaagatggaagcagcggtatggactgacccgaaagtgagtgatttgattaataacgactacgtattgattacactttatgtagataataaaactccgttgactgaacctgtgaagattatcgaaaacggtacagaacgtactttgcgtactgtcggcgataaatggagctatctgcaacgtgtgaaattcggagctaatgcccagcctttctatgtattgctggacaatcagggtaaaccgttgaataagtcgtatgcttataacgaagatattcctaagtatattgaattcttacagaccggattggagaattataagaaaggaaaataatgatttctccgataatgaccaatcttggataatgaataaaaaagcggtctcatcttttcgatgaggccgctttttgaatagaataaattgaaattttagcgaaaattacatgggtacttctattaatagaagttgggttccttttaatatatgtatcgggaattcttttgtatcccaaacaccgataccatcacgtttggacagccgttcttccgccactgtgatttctccttcaagtacgaagatatataccccgttaccttcctgatgcatcttatattcgattgttttttccgtatcgaaacttcccatagagaaccatgcatcttgtttgatagaagctggagtcttcccgttcggagacaggattagcaccagttcatttggtttcaggagcggacgaatatcgaagttgttatactccggtttggtgttttcaactcgtggaaatacccatatctgcaggaattccagttgttctttatcactgccattgtattcactgtgataaatgccgctgcctgtactcataacctgaatatcacccggagtgatggtttttgtgttttgtacactgtcaccatgtttcaggtatccttttagggggatggaaatcacttccatatttttatgcggatgtgtatcgaatcccatagacgggtctacactgtcatcgttcagcactcgtaatgctccgaaatgaattctttccggattataatagttggcaaaactgaatgtgtgatgggtcttgagccagccgtgattgaaatagcctcttgatgaagctctgtcgattacttttttcataatcttcctttcttttttaatagaactttggtgtgcgtcttatttgcactttactattactaataacaatggaaaggtagataaagttcttaacgggagatttaataagaagggagctttatttttttatttcagaaaaaatacatacgtttgtaacatcataacaatacctttgtggccaaaaataaagaaagtatgtacgcaacagacactctaatggatgaacgggaagtggttctccgtctgatagacggagatgaagaggccttttgcgaactttatgccgcttataagaatcgtttgctctacttcgccctgaaattcgtcaagtcgcatgaatttgcggaggatatatttcaggatgcgtttacggtagtttggcaaacccgtcgtttcatcaatcccgaagcctctttttcttcctatctttatactattgtgcgtaatcgtattttgaatcagttgcgggatatggctaatgaagatcagctgaaagagcagattctttctcaagcgatcgattcaacgaacgaaacgaataatcatattctgctcaatgatttgaaagagattattgcccgtgcattggagcaattaacgccccgccagcgtgaggtatttaaaatgagccgtgaactacagatgtctcataaagaaatagccgaagcattgggcgtttcagttcatacagtgcaagaacatatttctctttctctaaaagtgattcgttcctatttgactaaatattcaagtacatcagccgatgtacttttgattctattgtgcttgaatttataataaatgttaatcacaccctagctctttcttacttttgtgtattacttatacaaagggaaggaaattaatatccttattttgaatatatgatgaaagatactaaaacagaaaaagataaattgcatcgctatctggatgatctttatacccgggatgatgcttcacagttgttgcaaagtattaaggattcagaaaaccaagatatattggacgaactggcagcagaggtttgggaagaatccgggaacctgcaacctggtaatgatttggagcgggaaaaatataagagagaggcacgccaattactgaagcgtattgaacacaaaaaacgtacatggttccgccgggcttctgtggtggcagtcagtacagcggctgtaatagccattatcatagggagtgtcaactttttccggtatatgaatgcacaacaggtcacactggctgaaatcaccacttcctttggtgagaaaagacaagtgactttgccggacggaactcttttggttctgaactcttgttcgcaagtgcgttatccggatcgttttgttggagatctccgtgaagtggaacttgaaggtgagggatatttccgtgttgcccgcaatgaaaagatgccatttattgtgaggacgaagcggctggatgttcaggtgttaggtacccgatttgatgtaaaatcctattcaacagatgaaatagtgtctgtgagtgtggagagtggtaaggtacaggttgatttaccggaagcgatgatgaggctgactgctaaagaacaggtgcttatcaatactgtttccggagaatatagtaagaaaacggaggataggggagtggctgtctggatgaaaggcgggttacgtttttacagtacacctatccgcgatgtggcaaaggaactggaacgggtatataattgccggattacttttgcttccggtcaggatttcaacaacttgattaccggcgaacatgataacaagagtttggaagcggtacttaaatccattgaatttatcagcggtgatatcaaatataagaaagagggcatccatgtgcttctttataaagaatgagatgaataatagataatgtttaaccttttaaaaaataatagatgaaaacagctccttcatgaacctccccaaaatgatagaagcactccaaaggaatgcctctatccgcaatccggacggatattcataagcttcgacccaaatgaataacgtatcgcgcattgcttgtttttaataactttagtcaattactaaaacgcacaaatttatgaataatcttcttatttgtaaagggataagtaaaaatagctgttcgtttttagcttttttactattcaccttcattttaatagctccggctgctgctcagacattgaaagagcatgatattacgcttcgtgtgcaaaacgagccggtagagagtgttttcaataaaatcagcaaacagactaattttaagtttctctatgatcaggagacggtgaacaaggctccgagagtttctttcgacattaaaaatgcttcattaaaacagattctgggagaaattacttcccaggccaagctttatttcaataggaccgatcatacaattgctgttagcaaacagccgcttaagaaagaagaaactgttcaacgtacacgtactatacaaggtattgttgcagatgataaaggagaaccggtgattggtgccagtgtgcagattaagggagagggtagtggtacgattaccgatatcgacggacgttactcaatcatgaatgtaccggagtctgcaacattgaccatctcttatattggatataaaacggtaaatatctctgcaaaggataaaaatacggcgaaaatcacgttggtagaagatagtaagatgattgatgaggtagtagtggtgggatatggagttcagaggaaaagagacgtctctacttctatttcttccgtgaaagctgaacaaattgcggacgtttctgcttcagactttcgtcaggcgttggcgggtaagatgccgggggtacaggttacacagccaagtggtgatccggagggaagtgtaagtatccgtgttcgtggtatcagtacggttaatgccggtagtgatcctctttatattattgatggcgtgccggtagaacgtggatttgccaatctgaataataatgatgtcgaatctgtggaagttttgaaagatgcttcgtcggcagctatttatggtagtcgcggttccaacggtgtcattattatcacgaccaagcagggacaatcggaaaagatgaaagtgcagtatgatggatattatggcatccagagtgtttcgaagaaactttcaatgatgaatgcatatcagtttgccgaatttgcaaaggatggtcatgacaacgcttatctggatgctaatcccggagggtcaccggatgacccgaacggaatgcgcccgaactcatgggaacgtattcctaccgaactctttccctatctgaatggtgataaggggttgacggatacggattggcaagatgctatttttcgtactgctgctactaccagccacaatgtttctatttccggcagaggaaaaacagtcggctatttcatttctgccaactattatgataaagagggtattataattaattccgactttaagaaatatagtatgcgtatgaatttggacgggaaatataaaagactgaaatttggtctgaatttctcgccttcctattctacttccaatcgggtagatgcttccggatctaatggtattgtgcaatcggcattgatgatgcctccggtatggccggtgtataatgcggatggcagctataattatcagggaaacggctattggagaattggaaatgactatcagcataatgccgtattgaacccggtagccatggcaaacttacaatcggatgttgtagaccgtatggcgattgtcggaaaagtttttgctgaattggagttgtataaggggcttacttataacatttcttttggtggcgattattatggttcgcataatgaccaatatcgttcttcggaacttcctttattgggacaaaagtattatgatgtaaagtcaaatccgacagcctacagttcatcaggtttttatttcaactggttggtggagaataaaatcaattataacacaacgattaaagatgctcattccatcaatgtggtcttagtacagtcggctcaaaaagagacatataaaggagataatgtgacggcgaccgatttcccgaacgactatatacaaacaatttccggaggtacggtgacgaaaggtgcatctgataaaacccaatggacgattgcttcttatctggcgcgtatgcagtatagctataaaggtaaatatatggcttcggcagctattcgtgcagacggttcttcccgttttggcaagaataatcggtggggatattttccttcagcttctttggcgtggagaataagcggagaagacttctttatgaaggctaagtgtctgtcgtttgttgatgatttgaagttaagagcgagttatggagtgaccggtaacttccagattggcaattatgatcatttgtctctgatggctttggataattatgtgcttggcacaggtaacggacaattggtgaatggttataagccaagtaccataaagaatgaagatttgagttgggaaaagaatgcgatggtgaatgtgggtgttgatttgcagatgttcaaaggattgctgggattaactgtggattattataataccaatacctctaatatgttgttgaatgtaccagttccccacctgaccggatatagcactgcattgatgaatatcggtaaagtgaataataggggatgggaagttgctttgacctcacagaagaatataactaaagatttcggttattcgtttaatgctaattatgccactaatacgaacgaagtgaaggcactcggtccgggtaatgctcctatcatatctaccggtagcgtagatcatgcttattacataacgaaagtcggtgaacccatcggatgttattatctgttggtgcaggatggaattttctccaatgaagaagaattaaaaaagtatcctcatttcagcaatacccagccgggagatttccgctttgtggatgtagacggggatggagtgatggatttggataaagatcgtacaatcgtgggtaactatatgcccgattttacctatgggtttggtggtaaagtctggtttaaggggtttgaccttgattttaattttcaaggagtatatggtaatgagattctgaatctgaatcgtcgttacattgataatctggaaggtaataccaatggcaccactatagccttgaatcgttggaaaagtccggaagatccgggaaacggtcaggtgaatcgtgccaaccgtaagtcaaaggggtataatggtcgtacttcaacctggcatctggaagatggttcttatctgcgactgcagaatgtgacactaggatataccttaccgaagaacctgactcaacgctttttcgtggaaaaattaagagtttacgtttccggacaaaatttatggacttcgactaattatagcggatataatccggaagtaaatgcacgtccgagtaattctctttcaccgggtgaggattatggaacttatccattagctaaaacattcttgtttgggctaaacataacactttaatcatcctttaaaatacacgttatatgaaaaaatataaactaatactattcctatcaactgccttgttatcagttgcttgtacagatagtttcttcgatttggaaccgagtagcagtgtgcctaccgacaaggtatataagacagcggaagattttaatgtagctgtgataggatgttactccaaattgcagacacaagtttcctattttacagagtgttgcgaatatcggagtgataatttgacattgagtgcgcccactgccggaacacaagaccgttatgatatcgatcagtttgcagataaagcctctaatggaattttggaagatgcctgggcaaactttaataatggagtctatcgttgcaatcttgtattagatagaattgatgaggccaacttcgacgcaactctgaaaaaacaatataaaggcgaagctctttttatccgtgcccttacttattttaatatgtatcgtttatggggagggataccgatgactaataaagtggtgacggtggctgaagctcttaaaatcgggcgcagttccgatcaacaggtttatgattttcttgtcggtgatttgaatcaggttattaatgaaaatatgttgccgtcttcttatacaagtgccgatatgggacgagtgacttccggtgctgcaatggcattgctcggcaagatttacctgactttccataaatggacggaggctcgcaatgtgctatctcaactagtgggtcggtattctttaatgactactcccgaacaagtgtttgacgtgaacaataaaatgaatgatgagattatttttgctgttcgctttaataaagatgttgaaggagaaggacatggatattggttctctattattaatctgactgatgataccaatcagacaaagtctctgaaagagtgctacaaagatggggataagcgcaagaatctgattacctatgtaaaggtggaagataaagtatgcgtgatgaataaatttaaagatgtcaaaagtgcgacctataatacagtcggtaatgaccagattattctccgttatgccgatgtgctgttaatgtacgccgaagctttgaatgaaatcagttatagtaatttgcagaattcagaagctatggttgctttgaatgctgtgcatactcgtgccggattgtctccgcttcagataacagagcttcccgatcaggatagcttccgtaaagcgattatgttggaacgtcagcaggagtttccttatgagggacagcgttggttcgatttggtacgtatgggaggtgctaaggaggctatgaaagcagaaggacatattattcaggactatcaatacctgtatcctattccaaaaacggagttggaaagaataaacaatacagaactgttgtggcagaatacgggatattaataggattaaactaaaagaaatcaaacgatgaaaaaaatactatatagcttgttgtttattttcacggtagtctttactgcttgtgaagaagatctgccaaaggcaagtttcgatttatatgaactgaagtcactaacggcaacagccggagatatgaatgtgactctttcctgggaagcatacgagaatgcccgtccgaatgaatatttgattctttggacttccggatcatcagaagcggaaggaggcgagatgactgtggatgcaaaaacaatgactgccactatcaataatctggtgaacgatgttgcttacactttttctgtgcaacctcgttatgcgggaggattggccagtaaaactactgctgcctgtacaccgaagaatgcaagatatccgatttctgatctgacggcagcagccggcaatgaaagagtgcgtttgagatggacgaaacctgcgagtgaacgtttcactcgctatcaggttaccgtgaatcccggtaatcagattatcaatctggatgatacttcattggaagaatacatcgttgatggtttgactaacgatcaggaatatacattcaatgtagtctgtgtttatcctacaggcaattctattgcggtggaaacttctgctactcccggattgatctatcctattctcgctagtacggaactggttgtgtgggagccttctacctttgcttataacgatatgtatttcatggctggtgaagtgaaatcggtaagttgggattttggtgatggtacgacatcgggagaaaacaatccggtgcatgcttttactactaccggtacttatacagtggctgtaacggtgacttatgttaataataccaccgagtcgggcagtctgactgtcacggtcggcaattataaatggaattctgtcgatttgaacttcggtggacttaccggatatgtaaagacctccaatccggtgttctctccggatggaaaaacaatgtatatcccgacatctactcctgcgggtcatttatttgctattgacgtagtgagcggtgaattcaagtgggtgtttgctatcagtcagataacttatggcggaggtgcgttggtggctcctgatggtacaatctatcagtgtgtaagaaatgccactattaataatgtatatgctattaatccgaacggaactcaaaagtgggcagtaaaattggatgctgcgataggagctttccctgcattgtcggccgatggtgttctttactgtctcaccaataagagtacgttgtatgcgctggatgcatccagtggtgctattaaatggcaacaatcgcttgacggagcaaccggtagtgctgtggctattgataaagccggaaatgtttatgcaggtacaagtgcagccatttattcttttaaatcgaataaagagcagaattggaaattggaagaagtgaatgtgacagaacaggctacgtttgctttgaaggatcaggtactttatgcgactttgaaaaacggaggactcgttgctgttgatatgacaaacggaacaaagaaatggacgtatccgactacaaaaggagatgcttatttcccgattgctgataaaaatggcaatgtctattttactgaaaaaggatcgcagactgttcatgcagtaaatgccagcggatctaaaatctgggagaaaaatgtgggtaacaatttgaactacagtggaggtgctttgagtacggatggtattctttatataggtacccaatcgaataacaaagtgctgggacttgacatcactaatggaaacattgtttttgaagagactgtgggacaacaggtcatggcagctgttagcattggtccggacagacggctttattgcggaacgatcggatctaataatatcggttcgataaaggcttttgctgtcaataagacattagcaacagactcctggagtattcgtggtggtgatattcaaggtacaaaccgtcaaaagtaagcgataatgagagttcctgtttttatcttatttatggcgatgacaatgggtttatatgcacagaaatataaagtaggtacgactacagctttgtggaaagtacctgcttccacagacttttctcaagcccggtctgtgggggtagagtatgtggaagtagcatttaaccagtgttatagaggagttccggcagatgaagttgttcctcgtatccgggatatgaaagcaaaaattgatagtgccggtatcaaggtctggtctatacatcttcctttctcacgcacgttggatatatcggtgctggatgaaaagaaaaggaaagaaaatgtagattttatggcggagatgattggacagtgcgctcagtttcagccgaaatgtttggtactgcatcctagttccgagcctattgctgacagtattcgggcacaaagaataactaatgcttccaggtctatcgcttatctgaaaaaatatgcggatcaaataggagcacagttgtgcatcgaaaatctgccgagaacttgtctgggtaatactcctgaagagcttttggaaataatcaaagatactccgggtgtgaaggtttgttttgataccaatcattatactaaagggacgacagggcattttgtagaaactgttggtgaacgtataggtactatacacgcttcggactttgattttgtcaacgagtgtcattggcttcctacacaaggtgacattcaatggggaaagttaatgcatgcactcgaaggaatcggctatgaaggggttttcatgtatgaagctaccaaagaccatgaaaacgacaatacgcgtccgacaccggaacgggtggttgagactttcaataaaataattaatgactataaaaatcagaaataagatggatataataagaaaaatacaatatttactgttttgccttttggtaataggttttgttgcttgtgatgatgatgacaacaacagtaccgaaacaggttatgaagaaattcttacacaattggcagaggaagtagatgccactgcggaacagttgtggagttcttctcctttgattgtcaataccggacgtaccactactttgaccaagatccagggatatgcggataagtgtaaagatgattatttcgtcagttatctgaatggcttcgatcaggcgagtacgagtatggaaaagtgtgatccgattatctatttttatcggagtgcatttgatcgtgtgatggatggaattaaaaactcaaaagtagaaaatggtacggcagcgatctggttactctataatatggggtatgtggtaaaaactccgtcaggatgttttgctattgacatttctcatcgttgggcgaaagagctggcaccttatattgattttctctgtgttacacacaagcactccgatcattatagtaatgatcttatccaggctatgtttgatttaggtaaaccggtgttatccaactatttgaaagacgcgacatatccttatactgcaaagggggataaagattatgaaattggaaaattcaagattaaaacctgtatcactgaccataacaatgccgggttatctaattttgtgactgtgttttcgatcgattgtggggaagataccggtaatttcgtttttatgcatgtaggagactctaactataaaccggaacaatatacgaatctggcttctcatgtgaatgttttgataccgcgttatgctcccaatgctctgaccgaaaataatattctgggttcaggtgcgggacaggtggagcccgattatgtcttgttatcacatatcttggaactggctcatgcaggtgttgatgaatcaagatggtcattggatatggcactcgaacgggcttcgaagattaactgtgaacagacttatgtaccaatgtggggagaaaaactagtctggaaaaacaataaactgaactaaaattcttaatgcttgaacttatgaaacggatatgtaacttcatacttcttctgtgtttggtgcaactggctgttgctcaaaatagaatagctgaaatcagagaaaatctgctgggaaatcatccagataaaatattggttgtatcccaccgggctgactggcgtaatgccccggaaaactcattgcaaggtatacagaattgcattgatatgggtgtcgatatggtggagatcgatttgaaacgaaccaaagacggacatttagtagtgatgcatgataaaacgatcaatcgtaccatgtctggaaaaggactggtggaagattatacattggccgaattgaaagcaatgcgtcttaaaaatggagtagcttgtaagacaagacatcagattcctacattggaagaagtgatgttgctctgcaaaggtaagatcatggtaaatattgataaggggtatgattattttcaggaagcttatattgtactcgaaaagacgggaacggttgaccagtgtgttatcaaagccggccttccttatgaacaagtgaaagccgaaaacggtgctgtattggataaagtgatttttatgcctattgtacagttgcataaaaaaggagccgaagctattattgacagttacaagactcacatgaagcctgctgcttatgagttagtgtttgataatgatagtcctgaggtgcttaacctgataaaaaaagtgcgtgatacgggttctaagttgtttataaactctctttggcccgaattatgtggtggtcatgatgacgaccgtgcagtagaacttcatcaaccggatgaaagctggggatggatcattaatcagggagccaaattaattcaaactgaccgtcctgccctcttattggagtatctgcgcaaaaagaaacttcacgactaaatagactttttcatgttgaaacaacttataaacttttacaaggtctcttcaccgagaccttgtaacggggaagctttgtcttcatccggctcacaacatcttcattccgatgcccgtcgtctgaaatacctgaaatggtttacttttctttcagccactttcggttacggcatgtactatgtttgtcgtcttagcctgaatgtcgtgaagaagcccatcgtagatgaaggaattttctccgaaacagaactgggaattatcggttcggtattgttctttacttacgcccttggaaaatttacgaatggttttctggccgaccgtagcaatatcaaccgctttatgactaccggtttactggtaactgctttagtgaacctgtgcctgggttttacccattcttttattctgtttgctctcctttgggggattagtggctggtttcagtctatgggtgctgcttcttgtgtagtgggactttcccgttggttcacggacaaagaacgaggttcctattacggattttggtctgccagccacaatatcggtgaggcgttgaccttcctaattgttgcgtctatcgttagtgtattggggtggagatacggtttcttcggtgccggtattgttggtttgcttggtgctttaattgtgtggaagttcttccatgacactcccgagagtcagggctttcctcctgtaaatgctcccaaacagaaagaggagatgagtgtggtggaaacgacagactttaataaagcccaacgccaggtattgatgatgcctgccatctggatactggctctttcgagtgcttttatgtatatcagtcgctatgctatcaatagctggggtgttttttatctagaagcgcaaaaaggatattccacgttggatgccagcttcattatttccatttgtccagtctgtggtatcgtaggtaccatattttcgggtgttatttctgacaagttatttggcggtcgtcgaaatgttcccgccctgattttcggattgatgaatgttcttgcacttagcctgttcttgttggttcccggtgtacacttttggatagatgtgttggccatggttcttttcggtttgggtatcggagttctcatttgttttttaggtggcctgatggcagtcgatattgctcctcgcaatgcgtcgggagcagcattgggggtagtcggcattgccagttatattggggccggattacaggatgtaatgagtggtgttctgatagaggggcaaaagacggttcagaatggagtcgatgtttatgatttcacttatatcaattggttttggataggagcggctttattgtctgtatttttcgctttattggtgtggaatgtgaagccgaagtaatgatttgaataacaatgctttataaaaagggacttttcccttttaaaccaacgggtcgtttcttttaaaggaacgacctgtttcacaccgagaaacaacatgttccttttaatgaaacgcaaacagtttttcagtattatttcagtatcatgctttttctttgccggagataatttgttatctttgtaactttaacccgaaaatcaatgagtagaataatattaaatactaagacttggctattatttgtgctgttgtttggaatatcattttctgcatgggcacaaagtgacgattttaatacatggactaaattcaaggtaaaccataagatagattcccggttttcagtttcaggtgatttggaattgcgcatgaaagatgatgtgagtaaattggatcgttgggggctgactgttggcggaagttaccgaccctattcatttttgaatctgggggttggctatgaaacccatcttcggaatttgggtgactcggactggaagttcaggcatcgctatcatataactgctactgtcagttttcgttatcaatggttgaaagtagctgtaagggaaagatttcagcagacttttgatcgtggcaactctgaaactcgtttgcgttcccgcttgaaattatcttatgctcctacaaaaggaattgtttctccctatttctctgttgaaatctatcagagtttggatgacgtttctttttggagagccgatcgtatgcgttatcgtcccggagtagaaatagctttggccaaacgttggtcgttggatgcattctattgttatcaatatgcatcttcgcaaggcagacacattgccggaatagaagtgggatattctttctgaaattagcaggctcttaatataataatgtgagagtttaattctttgttcctgactagtcgtttgtaacttgttgattgtttgcgttatagatgaaaatgtgaaattttcctatagaaactatactccgacttaatataattatatacttttgctttcaagacatcaaaatgatatcttgaaattgatgattcctcagtacaacagacgtgttgttcagtatcccataaccgaaagcgaatacttcctcttatgctattctttctgttcaatcaaaagtttctattggaaaattaaaaaataaatatgatgaaactattttataacctacaaaggggcgtgggtttacttgttttttgtactatcttgcttagtgcttgtgtgaaccatatttcggaggaagaggaggatagtgttaataatggagatattccattgaaatttattgccgatattcgtgaatcagttggtacccgtatggcaaataataactttgctgaaggggatgaagtcggtctgtttgctcttgccggaaccactacaatgcaagaagaacgttatgtggataatcttcatttcatacgttcatccaatggtgagtttgaatctaacgagtcggtatactatccggatgatggagttacattgaatttaatcagttattatccttatcaaaagagtggcgtggggataggggagagcaccatgcaggtggcggtttcaacgactcaaaatattcctgacgattattcacattctgatttcctaattgcttctaaagaagaggtcttagccagtaaggaggcggtcgctctgacctataatcatcagttttttcgtctgaaaattgttcttattcctggagagggggagaatttggaagatatgttatccgttaagcctacgctttcggtgagtggcttttatactaaaacaagttatgattttcagaaaaagactttctctggttattccgaagagaaagatattattcctgcaggagaatgggagataaaagacggacgactgataggaaaggaatttattttgataccgcaggaggcgactccgggataccaatacataacgttggaagctgcaggaaagctatatataagcccattaccatctactttacaattaaaaagtggaaagcagcgcgaattggaaataaagtttgtatcagccgaagatgtattaatgagcaaagtgaatggggaaatcggagattgggacggaaccgaaatagatcatacagaatcagtcacgcttcataaatacatagatgtttcgaagttaacttttgaaaagtcgaatgtgtataaagtgttacattcgggaaagcaagtagctgaaatatgtaaggagtatcttgttactccggaattttcttcgcaggcaatcgttgcctatccgatgaaaaaagatggtagtgtggacttatctcaaggtgttgtagcacagttgctagggaaatccggaaaagtgaatggaggaagcgtatcatggaatatggaagattactcattggcctatgttgacggaactttgccgattcgtaataatgtatatgtgatggcaaacggaaccgtttctttatctgttacgacagcagatgacgtactatctgttttggttttggaagatatcgttcgtgatgtacgtggaggaatcattcataattatccgttagtgaagattggaacacaatattggatgcgggataatctggaggcatcttcgtatgttggcggtgaagcacttcccagactggatgcagtgacagcgaatgttgtcggatatctgcaatctactacggaacactatttttatacagctaatgtagtactttctaataaaattctacctattcattggagtataccggattggaaagactggaacattttaaaagactatctgaatggagaggcttctttgctgaaatcaggtacttggttacctttgaaagcgggagaacaggtacagcctgcaactaatttatccggttttaatggaatacctgtaggaatgtatgtgggggcttttcaaactgattacgagaaaaaacatctggcatattggacactggataatgcaaataccgctatcgatatcaaggttttctatctgaaaagtgatacggatatcattgaagaatctaatgcaggtgttgatacaaaagcctttgccattcgttgcatcagaaagtaaatcgacgaaaaaggcttctcttttccataaattgcttatatttgggaagtaaaactaactaaaagagagaactatgaagaagataataaatccctggaaaggtttggaagggtacaactgctttggttgtgcttccaataatgaagccggattaaaaatggaattttacgaagatggtgacgaagtggtaagcatttggaaaccacgtcccgaatatcaaggctggattgataccttgcatggcggtattcaagctgtcttgatggatgaaatctgtgcctgggttatacttcgtaaactacaaactacgggggtgacgtcgaagatggaaactcgttaccgaaaatcgattgataccaaagattctcatatcgtattacgcgcgtctattaaagaggtaaagcggaacatcgttattgttgaagcaaagttatataataaggatggagaagtctgtacagaatcagtttgtacttactttactttctcgaaagaaaagtcgaaagatgaaatgcatttttcgaaatgtgatgtagaatcggaagagatattaccattaatttgaaataaaaacttaagtttttgtgataaatgtttggtagtatcaaacaaatactttacttttgtcgcagttaataaaagaaatatgaaatatacagctacacatcatcatcatcattttcctaacgaataatcggtgggcgtggatgatattgtgtataactatataaacgataacgaaggcttaccgaatgcggtaagccttttttgtttttcaacgcagattgtatttgtaattaataattagtaattaaataaagtcatgttaagaatcgcagtacaagccaaaggacgtctcttcgaagagacaatggcacttttagaagagtcagatatcaagttaagcactactaaacgtaccttgttggtacagtcttctaactttcctatcgaagttctatttcttcgtgatgatgatattccgcaaacggtagctaccggggtagctgatttgggaattgttggtgagaacgagtttatggaaaaggaggaagatgcggaaattgtcaaacgtctgggattcagcaaatgtcgtctgtcactggctatgccgaaggatattgaatatcccggtttgtcatggtttgaaggcaagaagattgctacctcttatccggttattcttcgtaacttcctgaaaaaaaatagcgtaaatgccgaaatacatgtgataaccggttcggtagaggtgtctccgggtattggattggctgatgccatttttgatattgtaagttccggttctactttggtcagcaaccgcttgaaagaagtggaagttgtaatgaagtcggaagcattgttgattggcaacaagaacatgagcgaagagaaaaaagaagtgctcgaagaattgctgttccgtatgaacgcagtaaaaacagctgaagataaaaaatatgtattgatgaatgctccaaaagacaaactggaagaaatcatagctgtattgcccggtatgaagagtcctacagtgatgccattggcacaggaaggctggtgttctgttcatacagtacttgatgaaaaacgtttttgggaaattatcggaaaattgaaaggactgggagcagaaggtattttggtactgccgattgaaaagatgattgtataaatagataggaacgaaaattcgttcctgataaaatatgaaccatgaaattgattaaatatccctcaaaagagcaatggacagaacttttgaaacgtccggcactaaatacggaaagtttgttcgatactgttcgttctattataaataaggtaaggacagaaggcgataaagcagtattggaatatgaggctgcttttgataaagtaaccttgtccgcacttgctgtgactcctgaagaggttcaagccgccgggacattagtaaacgatgaactaaaggctgccatttctttagctaaacaaaacattgaaacattccactcttcccagcgttttgtcgggaagaaggtagagacaatgaatggggtaacttgctggcaaaaatcagtgggaatcgaaaaggtcggcttatatattccgggtggaacagcaccgcttttctcaactgtattaatgttggctgttccggctaaaattgcaggatgcaaggaaatcgtactttgtacgcctcccgataaaaatggaaatattcatccggctatcctttttgctgcgcaactggcaggtgtcagcaaaatattcaaggctggtggtgtgcaggctattgccgctatggcctatggaacggagagtgtacccaaagtatataagatatttggccccggcaatcaatatgtgacagctgccaaacagttggtaagcctgcgtgatgtagctattgatatgcctgccggtccttcagaagtggaagtcttggctgatgcatctgccaatccggtttttgtagcagcagatcttttgtcacaggcagagcacggaatagatagccaggctatattgattaccacttccgagaaacttcaaacagaggtgatggaagaagtggagcgtcaattagcagaacttccccgtcgtgaaattgcggcgaaatcactggagaatagtaaattgattttagtgaaggatctggatgaagcattggaactgactaacgcgtatgctccggaacatctaatcatagaaacggagaactatatggaagtggccgaacgtgtgataaatgcaggttctgtcttcttaggttcattaactcccgagagtgccggcgactatgcttccggaacgaatcacaccctgccgaccaacggttatgccaaagcctatagtggtgtaagtctggatagttttatccgtaagattacatttcaggaaattctcccggaaggaataaaagctatcggtcctgctattgaagagatggcggctaatgaacagctggatgcacataaaaatgccgtcacagttcgtctcaaagcaattcaaaatttataatttaaaacttaaagaagtgaaaacgttacaagaactaacccgaccgaatatctggaaattaaaaccctactcttcggcacgagatgaatataaaggagttacagcctctgttttcctggatgcaaacgaaaacccctacaatacacctcataaccgctatccggatcctatgcagtgcgaactgaagacgttgttgtcgaaaatcaaaaaagtatcccccgagcatatttttcttggaaacggtagcgatgaagccatcgacttggtttttcgtgcattctgcgaaccgggaaaagataatgtcgtagccatcgaccctacttatggtatgtatcaggtttgtgccgatgtgaacaatgtggaatatcggaaagtattactggatgatgacttccagttctctgccaataaactgctggcggctaccgacgaacacactaaattgattttcctttgctcgcctaataacccgacaggtaatgatttgcttcgttctgaaattgtaaaggtactttgtcagttcgaaggattggtgatgttggatgaggcttacaatgatttttcccaggctccgtctttcctcgaagagctggataaatatcccaaccttgtcgtattccaaacattctccaaggcttggggatgtgctgcaattcgcttgggaatggcttttgcttccaaagaaattatagacattcttagtaaaatcaaatatccctataatgtcaatcagttgactcaacaacaagctatttctatgttgcataagcactatgagatagaacgttgggtgaaaacgttgaaggaagagcgtgattatctggaagcggaatttgaaaaacttccatgtaccatcaaattgtttccttctgacgccaacttctttttggctaaagtgacagatgctgtgaagatatacaactatttggtcagtgaaggaatcatagtgcgtaatcgtcataatatttcactttgttgcaactgtttgcgtgtaactgtcggtacccgtgtagaaaataataccctactggccgcccttaaaaactatcaaggataatttatgaagaagaaagtattatttatcgatagagatggcacgttggtaatcgaacctcccattgattatcagctcgattcattggaaaaactggaattctatccgaaggtattccgtaatttgggtttcatccgtagtaaacttgactttgaatttgtgatggtcaccaatcaagacggattgggtacatcttcttttccggaggagacattttggcctgctcataatctgatgcttaaaacattggcaggagaggggattacttttgatgaaattctgatagaccgtagcttccctgaagataatgcacctacccgcaaaccacgtacgggaatgttgacgaagtatttaaatagtcccgattatgatcttaccggaagttttgtgataggtgatcgtcctacggatgtggaacttgctaaaaatctgggttgccgggcaatttatttgcaagactcgaccgacgctttgaaagaaaaaggattagaagaagtctgtgctcttgcaactactgactgggaccggatagccgaattcctttttgccggagaacggaaagcggaagtacgtcgtactacaaaagaaacagatatttatgttgctttgaatctggatggaaatggaacttgtgacatttctaccggtcttggctttttcgatcacatgcttgagcagattggaaaacattccggcatggacttgaccatccgtgtaaaaggagatttggaagtagatgaacatcatacgatcgaagataccgccattgcattgggcgaatgtatctatcaggctttaggtagcaaacgagggattgaacgttatggctatgccttaccgatggatgattgtctttgtcaggtttgtctggacttcggtggtcgtccctggttagtttgggatgctgaattcaagcgtgagaagataggagagatgccgacggaaatgttccttcatttctttaagtcactaagtgacgcggcaaagatgaatttgaacatcaaagcggaaggacagaatgaacatcataagatagaaggaatttttaaagcccttgcccgtgctttgaaaatggcaattaaaagagatatctatcattttgaacttccatctagtaagggtgtgctttaatgttttttagaatcatatccatattgcttatgcaaaagcaaatcccactatgcttattggcgatagtcttatccgtctctcttttcggtcaaaatctgaaagcggataagattattctgtctgatagtgatttgacaaatttgtatcaaatagattcgggcgtatatcgttcggagcaaccttcaaaagagggctttaaagctttagaaaagtatggtattggagaagtacttaatctacgaaacagacatagtgatgatgacgaagcaaaaggaacaagtataaaacttcaccgggtaaaaactaaagcacattcgattagtgaaaagcaattgatacaggcattacgcattattaaaaatcgtaaagcgtctattgttttccattgtcaccacggctctgaccgtacaggggctgtttgtgcgttttatcgtatcatttttcagaatgtttcaaaagaagatgcaatccatgaaatggctgaaggaggctatggctttcatcgaatttataagaatattattagaagaatcaaggaagcaaatgtggagcaaataagaaaagaagtaatggaaggtggagagttataatatgccatatctttaccatcgctctgtcacagctgtgccaccgtattgtcacaaccatgccatcatgctggcacagttgtgccaatgcggtggcacaagcctattgataggacgtctttacaaggcctctatttctttaagccacatggctgaactggcatcgctcggcattctccaatctcctctcgggctgatagaaatacttcctactttaggaccgtccggcaagcaagaacgcttgaactgttgattaaagaaacgacggaagaaggtagaaagccatttcttgatggttttttcatcatacatatctttgaatgcaatatttgccagatagaatatcttggaaggccggaaaccgaaacgtaagaaataatataggaagaagtcatgtagttcataaggacccaccaaatcttctgttttctgtttaatttctccgttttcatctgccggaatcagttccggactgatgggagtatctacaatatcgagtaaagtcgctttcgaattttcatccatgccatttactgccacccattgtaccaagtattttacgagagttttagggacactcgcattcactccatacatggacatatgatcgccattatatgttgcccatcctagtgcaagttctgataaatctcctgtaccgataaccattccccaagtctggttcgccacatccatcaatatttgtgtacgttcgcgtgcttgagaattttcgtatgtgacatcgtgtacattaatattatggtctatatccttaaaatgttgaatgcaagcatctttgatactgatttcacgaatagagatacccagcgatttcattagatcgatggcattatgataagtacggtcggtcgttccgaatcctggcatcgtaatgccgagaatatcctttctggacaatcccaacttatcaaaagtcttcacacatacaagtaatgccagtgttgaatccaacccgccagagataccgattacagcagttttagctcctgtatggacaagcctttgtgccaatcccgctacctgtatggagaacacttcttcacaatgttcatttagctctattccttgcggtacaaaaggatgagaattaaacttccgggttaaggttagctctttgctgttgacaaattcagtcgcaatagaaaccgcctttttatcccctaagtttgcttgattagctgcaaaggttgtatttatcctgcgttctgcccggatacgttccacatcaatttcgctgataatcagctgttctttcatgctgaaacgttcgctgtgtgcaagcagtgaaccgttttcataaatgaacccgttgccggcaaaaactacatcggtagtagattctccaaagccacaagacgagaatacatatccggcaatacaacgtgcagattgttggctgatgagagaacaaagataattattctttccaataccttcattatcagcagacatattgaaaagaatttctgcaccttgcagtgccaacgaagaactgggaggtatagtagaccaaaggtcctcgcatatctcgatgccaaaagtcgtatctgaagtctcaaaaagcagattagaacctatcggaacgatttgtccacagagacgtacactatttgttgtcaactgaagcgccgaagtaaaccagcgctgttcgtagaattctttataattcggcagataggtcttggcggcaactcccaacactttccctttctgaatcactacggctgcattgattactgtcgaattgacaccgacaggcataccaacaatagaaatgatgtctaattggcgagtgttattcagaatttgcatcagccccatttctgcttcttccagcaaaagttgttgtccgaacaggtcgccacacgtatatcctgtgatactcatttccgggaaaataatgatctgcactccttttccttcagccactgcaatcagactttctatcttctctacattgaatttacagtcagccacttttacgtgtggcacggctgcagctacttttacaaatccgtagttcatcttataccttatttatatataatgggtgcaaaaataggaaatacttttgaatatttatcttttctgcattgaatcctctcgataagctattttgtgtgagatatggcattgttgtttaaacaattaaaataactatcaaaatggttgttaatgttaggtttatattgaaatatattgtgtatttgtttcttaaatgagtaatatatgcttaaatatatagcaaaaagatataagtggaaatatggtataaaatatgcgacatattgtttcttttatttaaatataatatatatatttgtacccgaaaaagaacgatattggaagtatataacacctaaacagaacaagtgatattagtgtttaatttataacttaagagagcagatggtcatacgtttaattcacacagcagtaacacgaaaaaattatttggatatttggcgcaatattaagaatttgccaagttagtctattcctattctatatttatagataataatagcctatcccgggtcggtgcagaatatgcttaaagccgattttggggaaggagtgtattactattccatatgcgaagataagcgtattcctaattgtagataaatctataaaaataaatcaatttcattaattttaattcaagtatcaaagatgagaaaatcaattctcttgtttgtactctttactctgacaagtatccccctgttgctttttgcgcagggtggatatcaggtaacgggacacattatttcggcggaagataatcagccgatgattggtgtgtctgttttggagaagggtacgacgaacggagtaattaccgatatgaatggtaattacagtatcacagtgacgaaatcccccgctattttgcagttttcttacattggaatgaaaacgatggaaaagcaggtgtctgctgccactcgtattgatttgaagatggagagcgatgcgcagatggtagaggaagtggtggtcgttgcctatggtacacgtaagaaaggaacgattgccggtgccgtatctactgtaaaggcagaaaaaatggaaaatgtacctgcggccggtttcgaccaatcattgcagggacagacccccgggttaacggtaatctctaattcgggggaaccaagtaaggcggctgttttccagcttcgaggtaccaattctatcaattcgggtacatctccgttatttattttggatggtgtgcctatttccagtgctgattttaatacaatcagtccgggcgatatagagtctatctctgtgttgaaagatgcttcatccacctctatttacggtgcccgtgcagcgaacggtgtggtagtaatcacttccaaacgtggtttggcgattgacaaggcgaaagtaaccatgcgtgcgcaatggggtttttcacaattggcttcagacgacaattgggtagtgatgaatactccggaacgtatccagtttgaaaaagaaatcggtttagatacgggaaaggattataacttgttgtctcgtacggatgtaaattggctggatgaagtattcaatgaccgcgctcctttgcagagttatgaattgtctgttaatcgtgctaccgaccgtttgaattattttgtttccggaggattctatgatcaggaaggtattgcccagagctctaattttcgtcgttataatatgcgtgctaatgcggaagtgaaagctagcaactggctgaaaataggtactaatacgatgatggcatacgaagaaatagcacaggctgaagagggagaaccggcactttatacacctatttccggttcgcgttttatgttgccttactggaatccttataatgctgacggctctttggcttccgaaaacgatggaacttggacaggaaccggacagaacccgatagaatggatggcgaacaatcctgtaaaatatgaaaaatacaaattgctgtctactatcttcgcggaagttactccgattcgggatttaaccattcgtgcacagtttgctgcagattatgcacattctacagctttcatgcaatctttcccaagttatataattaataataaatcaggtaaagccgggcgtagttcatcggatattcttagtttgagtgaaactcttacagccaattaccgatgggctttgaatgataatcattcattgaattttttgctgggacaagaaggtatagactatcgttcgaccggatttcaggtaactacacaaggacagaacaatgaccgtctaaccaacctgctttccggaactcgtgctatctcgtggccggactcaaatagtgcttatgcatacctgtcttttttctttcgtggagagtataactataaagagttatattatgcggaagttgctgcacgtacagacgcttcttcccgttttggtaaagaccaccgttggggaatgttctggtcgttaggttttatgtggaatatcaagaacgaggctttcctgaaagaaatagaatggctcacgaatgcacagattaagttaagtacaggtacgtccggaaactcggaaattccttactatgatcatctggcactggttgccggtgatgccaactataatgatgaagctggtatatatcccaaacaaagcgggaacgaagaattaagctgggagcaaacttgggcaaacaatatcggtttgactttgggctttttcaatagagtcaatttgaacgtcgatttttatcataaaaagacgactaatatgttaatgttagttcctcaatcgtatgctattaccggtgtcggtaatcggtgggacaacattggtgctatgatgaatcgaggagtggaaattgcaatggacggagatgtgatccgtacaaaatacttcacttggaatctgagcgcaaacgtatcttataataagaataaactattggaactttataatggtgtggaagaatatgtaaattccactaccggattgaaatacgtagtaggacatcctgttcatgaatactacatgaaccgttatgcaggagtgaatccggctaatggtgatgctttgtggtacactgctgacggagaactgacaacagaataccgtgaagaagacaaagtaatgaccggtaaaaccttcgactccccctgggcaggcggcttcggcacaaccctgatgtggaaagggctttcattatcggcccagttcagctggatggctaaaagatatgtgatgaataatgaccgcttcttcgaagaaagtaacggactgtatagtgcttacaatcaatcaagaagactattgtatgatcgttggaaaaaaccgggtgacattacggatattccccgttacggagtgacagctcaactggacgaccgttttcttgagaactcatcattccttcgtttaaagaacctgacactggcttatgcgcttccgcaatcattgttgaataaaactcatttcttcacgtcagcacgtgtctatttgcagggacagaatttgtttacttggacaggttttacaggacttgatccggaagtggcatctaatgtatatagggcacagtacccggcttcacgtcagtttactttgggtattgacatttcattctaatagtataataaagaaagatgattaagaaatttaaattatatatcctgatggctgctgtggctctttccgccacttcctgtttggataagatgccggaagactctattccttttgatgatgccattcagacggtggatgatgtaaatctggcagttatcggtatttacgacgcattcaagaatagtgctctgtattccggtaatctcacgatacttcctgatttgcagaccgatcttgtgtatgggatcaacggaaatacgaatacatacggagatatctggcgctggaaagacattctggcaacaaatacaagtatcgaggctgtttatgccggactttacgatgtgatcaatcgttgtaacttcatgctcgatcgtgtagacggagtgagaaacaatacaaccgatgataatgatttggacaagcttgaccagtattgtggtgaagcttattttgcccgcgcacttgcttactcggaattggtaaagcttttctgtaaagcctacgaaagtgatgaagatgctgctaatcagctaggggttatcctgacgaaacattatcaaggcgacgaagaaatgaaacgttcttcgttgaaagcttcttatgagtttattcttgaagatcttgaccgggctgctaagttgttggagttggataaagactatgatccgtctgtagatgtggctttatttaacaatgctacttacttcaacgaatatactgtatacgctttgcgtgcacgtgttgctctttatatgaagaagtgggatgaagccatcaaatattccagtaaagtgatagatagcggatattatctgttggctagttgcactcgtgcaatttcctccggagtcagctattataagtatatgtggacaaacgacatggctacagaagctatttggaaagtgggcttcaccgtcaattcttatggaggcaaactgggattgattttcttaaattacgaccatgtgaattatcgcccggactatgtcccggctacttgggtgctcaatgcttatgatatgaatgatttacgtgcctctactttcttcgaatcgcatacaactagttttagccatcatctttcttggcctttgctgattaagtatgccggtaatcaagatttcatagctgctaatattcttcatgtttccatgcctaaagttttgcgtctgtcagaacaatatctgatacgcgctgaggcttacgtgaaaaaggaacagccggactatggccgtgcgggaaaagatattacgacactgcgtactgcacgatattcctcttatggtggatcaactcccatgagcgaggctaatgcaatggaggttatcgagtccgaacgcgtgaaagagctttatatggaaggtttccgtcttcatgatttgaaacgttggcacaaaggtttcgagcgcaagccgcaagaccagtctttgtcaactggcgatagattgaaggtagaagcagacgatcctttatttgtatggcctattccgcagcacgaactagacgctcccggctcgcaaatagaaccgaatgaaagtaataaataagattaaaacatacgataatgaagaaattattaataggatgtatggcagccgttgctgctctgatagctttctccggatgcgatcaggacaaggtggtgtacagcggacccaattatcttatgttttctgacacgctttatacttatgccgtgcaagaaaccaatgagatattcaatgtgcctgtttctgccactgtgcctgccgactatgaccgcacttttggtgtcgaagtcatagataaggagagtaatgctgttgaaggaaagcactacaaaatcttgtcgaataccgttactataaaagccggcgagatgagtactgatgttaaggtacaaggtctttataagaatataggtattactgattcgctaggattcgctttgcggttggtaatccctgatactgaacaatggagtttatacaagaacgaggcaaaggttgtgatgcaaaagatttgtccgtttgatatcaaaaactttaagggctattgcaaagtgacttccagctatttgtcttccgattactatccgaagaaagtagatttgcgattagtgacttctgatattgtggaaggtaaagaaaacacgattgtagtccatgatctttattttgacggttacgatatggagataaagttcaaccggaaagatgttttggaacctctcgtagaaatggaagaacagatttgtggctctaccggagaggcattcaatacgattcatggcgatggcaagttacggttaaatcagcctacagcttatacttcgttctatagtacaaatgagaattttattttgcagtatgttacgatgagtgtgaataataaagacggctcatactacggtacggtaggaacatttgtcaatgtactcgagtggataagcgaagcggaagctgaaaaattaaaagaacaaggatattaaaaaatagcaatagataaagatatgaaaaagtttagtttaaaaccactaggagattcgtgcatgaagacattatgcaagagttggctctttattggcttacttatggctttctgccttgcggcatgttcggacgacgatgatgatgcagtgactccgatattcccggaaaaacagaacatcatttgcaactctaatgatacaagggagttcacttttacggctaatacgaactggagtttggcttcttctgccatttggtgtaagttcaaggcagatgacatggaagaatttgtcctgtccggaacagccggtacgcagacagtgactcttctggttactgacgataatatgcaggcgggcaacgttagcgtagctaaattggaattgacgatggggggtcagacgattgtaattggtgaagtgacccgctcgaaagtagattatgaattgaagatatacgatgcagatggaattgatatcactgaacaaggaatacttaaagtcggatatagagattttgttcgttttgatgtaaaagctaacttccgctttgcagcaacgaatctgccgggttgggtagaattggaaggtggttctcttgttggtgcagtgaatcagaaagtgaaaggcggtttgaaaatcatcgaaaacgaggttcgtgaaaagtatccggttcaggctagtgaagaaaatgtgatcacattcgctgatgaagagggaaggtcattcaaaactttcaaagtggtttatgatggcatgacgccgggaatgatggagttgactcgtccttcaagctatgcatcggattgggttgtatcaatggatggaaagacatttacccagaaaagtacaggtggtagtacgggtgaagtaacactacacaaaagaatgccatttactgtcaagactctggaagatgattttgaaatcgtatttttaagtgagggatgggacggtaatatccatcttaaaggttccgattttgatttctttacttatgaatggatacattgtgaaaaggatggaggaaaattgaatttaactattgatgaatatattcctaacgcaatgaatggtgaccctgatgaaagaatgggatatgttcttgcattttcacgtgctgaatatgaaaatataaaagataatctagaggaagctattgttgtaaatggagaaatagcttataagtatgaacagaacaatcttttagttggatttactcaaaaagaagtgaaagaagagccagataataaggcatttaaaataacatattatgatgcagaatgggctttgcaagaagcaacttgtactaaagcagataatgactatggttatggtatcgaggatgtttatatattaaagcaaccagattcaagcggacatgctctaactattgatccgtttatggggagttatgagatagattggactgttcagatatggataggtgatgttaatgttacaagtcaatatatggaaccattggaaaaagaaattacattttttaatgatgagccattagaacaagaaattcatgtttgtttcaaacaaaattatatgaatgttaaagttttgattattactccaaatgaataatatagattaaatgaatctacataaattatactcaatatacctcttaccccttatcgtcagtatactgacgatagggttggtaactggttgttccgacgatgatgaagcactgcaaagccagtatggttatgtgcagttccgacttttcaaaagcgcgtcgtttgaaggagcaactactcgtgcgacagacaaacttgaatcgttgtcgagtgcacagaagataaaggtggtaatggagcataacggtacaaccgtttcgcagactttacctttgaacgcatacaatgaaaataatgcagaatatggtatgcgtagtgaaaaattgcagttagttgtcggtacttataaagttatcggttattatctgtatgacaaacaggatatagtgttgttggctggtcctggtggagatgataatgagttcgttgttgttggtggcggacttcaggaaaaagcattagcggtagatgccgtgtctcgcggaactgtaactttcaaattgacaaaagaatggcttccggctactcgtgctgctggtgaatatctgtttagtgatattcgctttatcaatgtcacagtgatgaataccttcaatagggtcactactgaactgaaagatatgaaagtcacctataaagaagattctaaaaagaatgagatttctggtaatcctgataacaagtatatggatataggtgtagcgacctgcgactctgccgtatggcttcctgccggaacttatcaggtagtagcttacaccacttacacaaaaagcggtagtacaaaaaaggaactggaaacgcaacccgtcagaggcgaacctttcgttgtgaaagataatgagttgacagaagatgctaatgtgcctatccaattgaaggaaactgcagagtatatcaaggactatatagcactgaaagaaatttggaaagctttaggtggtgaaaattggaaatattatggaggttcagtagataattctgtgcacagctcaaattggaacttcaataaagaaatggacatgtggggcgaccagcccggtgttgatttggatagtaacgggcgcgttaccggactttcagtcgccggcttcggagccaaaggctttgttcctgatgctatcggacagttaacagaactgagaacattgtctttcggtacacatagcgaaacgctgagcggaagaaagtttggtgaagacgaactgactccagatatgagtgaggaacagaaacagcggatacgtatgcattataagagaacattccttgattacgacccgcgtctgaatatgtcggaacttatacaagatgctatcaataggaatccgaaaatgaaacctatcaagaaaaacagtcgtattacattgaaggatacacaaataggaacttttactaacgatattacgtttgtatcgaaagctattatgcgattgactaaattgcagacgctgttttttgccaattcgcctttcactcaagatgacatcgcaaccaagtgggcaaaagaggattccgaatatgccaaacaatatatgaatgaggatctgagctggagcaaaatggagtcattgacagatgtggaactgtataattgtcctaatatgacccgtcttccggaatttatatttgatcttccggatttacagttgcttaatattgcttgcaacagaggtattaaacctgacgatatattggctgattggcaaaaattggcggacgatgaagatacaggtccgaagattcagatcttatatatgggatacaacaatctggaagcattcccgccacacgagtcgttgaagaagatggtaaagcttggtttgctggattgtattcacaataatatcagcacactgaatcctttcggtacggaagtcaaactgacaactcttaagctggattacaatcagatagaagaaattccggatgatttctgtgcgtttaccgatcaggtggaaggcttgggattttcacataacaagttaaagtatattccgaatatattcaatgccaaatcggtttatgtaatgggttctgtagatttctcatacaatgaaattggttcggaaggtaaaaatataaaatgtggaatgagtgagttcaagggtatcaatgccagtacgattaccttatcctataatcagatagagaaattcccgacagaattgtttgcgtcaggatctcctatttctactattgatctgagcaataataagatgacatcgattccggaatattcactgaaaccgaaagagggtaattataagaatacgtatctgctgactactatagacttgcgttttaataaactcacaagtttgtccgatgatttccgggcgaccactttaccttacttgagtaatatggatgtcggcttcaactgtttttctaaatttccgacgcagccgctgaacagtagtcagttgcaagcttttggtatccgccaccagcgtgatgcagaaggtaaccgtattttgcgtgaatggcctacaggtattactacttgtccgagtttgattcaattgcaaatcggttcgaatgacatccgtaaagtaaccgaaacgctgacttcgaaactttggattttagatattgcagacaatcccaatatatctattgatgtgacaagcgtatgtccttatattgaagcaggtatgtatgcgcttatatatgataagacacaggatattcgtggttgtgatgctttggatattgaacgataataaaaaagatgctattaatgaaatatttaaataaaataacattaggactgattctttgcatgggattcatttcatcgtgcaaggatgatgatgaagcgggaatcaatggtatctcggtagataaggaagagattactattggtgccgaaggaggaacagagaggatatccgtttcatctaatgaacaatgggtggcacgtgtgtctgagccttggattgccgtttcaccggcaaatggtgtgggttcggcagactgcgttcttgccatagactctacactgaaaaatactgcacgcgaggcacagatacgcttttctatgaatggaggtgaatctaaattggttactgttacgcagtttggcttcggcaagcaaattatagtgagagaaccggaagtggaaattcccagttccgatactcacaaaaaacgtcattttgaaactaccatctctacgaatgttgaatttgtgatcgataaagtagattattcttttgctgaagaggctacaatgaccgctgaggagaaagcggaagtggagagagaacgtactggttggctgacatcgccgaaaatggaggatttaaaggttgatcttgacaggggtgcgcgtccccgtactctgaaggttgatttccgttggggaatgaatgtggctccttatactcgtgtcgcaaaagtacgtttagttccggcacatccggaaacagaccaattagtagatgatgacggtaatgaaattgatgctgttgtgttgactgtaacacagaaggctgcaatgaaaattgaagataaccgttcgggagactcgttggctgtaatcactattaatagcaaactccagaccatgatgagtttcgatactagtgaaaatatgactaactgggattttgtgacgctttgggaggctactgataaggagattaaaaataacgaagttcctgaggaagcaataggacgcgtgcgttcggtaagttatgccatgattgatttgcaaagtggtgattctataccaaaggaaatccgtcatctgaagtatttggaatcattctctattcaaagtaatgcgaaccgacagacacgtacagttcatttgggtgaggaaatctgtgaattggaatatttaaagaatctcactgtattttctcttggaattgaagacttccctaataattttgttaaattaggtaagaaactggagaaattggatttggcaagcaataatttcaagacattgtcagtgattactgaaaaagtaaaccagaacaacttcccgaaattgaaatatctgacattgaccagctgccgtgctacggaaacgctgagcgatttaagcctgattgaaggcactaaatacaatggtagagaggtcggattgtatgtgaatatttctaaagggcaactggaacgggaggctttcttgaaattgctgacttgggataatctgctttcactgcaaatgtcatacaattttatagagggtgaacttcctacagatgaagaagtaaccgaagctttgagagcggcaggaaaaccactgacttataaggctgatgatttctttactaaagaggaactgacagctacgccgtctgtataccagagtaagatatcaaaagacacttgccaatggttgttgacaacagatcagcctgtggaatataagaaaaccaaaactacggtaaatgggcaacaaataccgcgtgtattgccatttgcccgtaatgttcatttcaacttgaacttcctgactggtgctgtgccgaattggattttattccatccttattttgcatattggtatccggaaaccatggtattcaatcaacaggagaatggtaagaattcaagtggaaccgtggttggatttagtaatgtggatttggttaactacgattattcttattattatggaaaagaagatccggggaacgatacagttgtggatggtgtagcttatccgttatatttcagaaaattcgtactatcggatacaactgactaggctaattgtggcataaatatcattaacaagaataatttaaaaaggaacaatgaagaaaaaattcttatatacagcactgtttgctatgatattggcttcatgctcggaacaagaacttattgaacaaccgtctacccctgtaggggggacggaagttcagcttccggctgatgtcacttccggcgaactgctgattaaattcgatcctcaaatgacagatattcttgatcggactctaaaggttacgacaagaagtggaggagctatgactcgttccggtattccatctacggatgaagtgttggacattctgggagcatatcattttgaacgtatatttccggtagatgttaagaatgaggagcgtacacgctctgccggattacatctttggtatcgggtaaagttcgatgaaaatacagatttgaaggaagctgccagtcgtcttgctaaattgggagagatatccaaggtacaggctaatggccatattaagcgtgcttataatactaaaggttacaggagttatataagcgaagctgcgttacaacaaaaatcagctacacgtgctgtaacagcaagcggtagattctctgatcccggattaccttatcagtggcattacatcaacagtggtactaatgagttcgataataaaaatgggcttaataatggttcggaagctggatgcgatgtaggttgtacggaagcttggaagaaatgtactggcgatcctgctattattgtggctgtgttggatgaaggagtgatgcatagtcatcccgatttaagagataatatgtggatgaacgaaggagaagaactttatgccgatacagataaagatggtaatggatataaagatgacaagtatggatacaatttcgtaagtgatacaggtattatctcgtggatggaggctgaagattccggacatggaacacacgttgcaggaactattgctgctgtgaatggtaatggtgaaggtgtttgcggtattgccggtggtgacgggccaggaaagcccggagtgagaattatgtcttgccagatcttttcaggtgttaatggtgctactttggatgcagaagccaaagcaattaaatatgctgcggataatggtgctgttatcttgcaatgtagttgggggtataactcttctttggctaatatgattgaaggatattctcccggaccgggttcggaggaggaatgggaaaatatgtatccgctggaaaaagaagcattagattatttcatcaataacgctggttctcctaacggagtgattgacggtggattggcaatctttgctgctggtaacgaatatgcaggaatggccgcgtttcccgctgcttattccaaatgtatatcagtgagtgcagtggcggcagattttactcccgcttcttattcaaactatggtaaggaggtgactatttccgctcctggtggtgatacggaatattataataaggtgggacaggatgatcccgaaagttggtcggatggaatatattccggttctattttgtctacatggatacaaaatggtacagctacatacggattcatggatggtacatctatggcttgtccgcatgtatcgggagttgcagcactaggtttgtcatacgcttatcagcaacgtcgtcactttaaagctagtgaattcattgagctgctaaaggcttctgtaaaaccgttggatagttggtatggcaatggaaaggtgaaaaaatattatcgcaaccatctatcggtaggtgcttctcttacccaaataaatttgtcgaaatacattggtaagatgggggctggtcttgtagatgcaggacttttgcttgataatatcgaaggtaaaggttcggacatggtagtgccgaatgtgtatgtggcggaaggtgcggaatcgactctcaatttggcttactattatgtgggaggagagaacctgacttatatctgtacatcgagtgacacatcggttgctacggtaactgttgaaggtacactaatgaaagtatccggattgaaaaccggtgcgactcgcatcctggtgaaagtaagtaacggaaacgaacagaccattacagttaccgtgcgtaagaatgcgaatgataacggttggatgtaaattctgatattttaatgaaaccatttactctgatacggctaattttattaagtgcagtcattggacattgccggatgctcgaagccaggattggttgttcagctccacaggtacgaattgattcacttataaatccgccgttgttaaagcaggccggacaaatactgcatttcgacagtacattaataaatatcggaacattaaccgaagatgatgctccgaagacatatcgtttcatgtgtactaatgtaagtggtaagaccttgaatttaacccgggtcaaaacgacttgtggatgcgtggttgcggatattcaatccggagatatattaccgggggaaacaaaggttatcggattgacttataatccgaataaccatcccggaacgatagatgcaaatgctttcgtttatttgtcgctttctgacgaaaaacctgtggcacgactcacattaagaggtaatgtgctacccggcgcagatgaatgggcgcggtatccatatataatggggaaattgcggctcaaacaaaaccggatggaatttaaaatttccgggaaacgcttgtcagaacgaattctctgtggtaatagcggagagcaagagttacgtttgtcagcctccggtgttcccaagtttgcaacttttcgtacggaaccggaggttatcagtccggcgggagaagctgatatagtggttacgatagatacatcacagattccttcaggaaaaggcagttcgtttacctttcctattataatagaaggaatagatggaccgcagtctgaccgtacattgaatattagagtaaatcgtattgagtaacgtaataaataaaagaaaatatgaagaatatatttaatttgatagcattattcgccttcgtactttgtttcacttcttgtgatgacgatgagaagacggatattccgacattgccggtcactccggccaacttgaacggtacgtggcaactggccgaatggaacggacaatctcttgccgaaggtacgtattgctacataacctttaaccgtaaggaacaaacttttgaaatttaccagaagtttgacagcatgtacgcgcgttatatcactggcgattttagcattgaaaaagatccttatttgggatatgtgattagtggtgaatatgatttcggcaacggtgaatggaacaatgattatatcgtaaccgatttattggaagccggttctatgatttggacagcgaaagacgatgcgggggatgtgtctaaatatgttcgttgtgacgaggttccttctaagattgtagaagaagcgagagctgatacggataattaagttttaatttacggaaagaaaaagaggattcacgccattcagtaaatggagtgaatcctttttttatactgatttatctctttacctaataatgctagtcatgtcacaaaaaaaagtcatgaattatttggaaataagattaaggatttctatctttgcattggatttataattgtaatgaatacaactttgaaaagaaaggaagatgatgaaaccatacgatcgattattagagcataatatcaagccttctatgcaacgcatcgctatcatggaatatttgatggagcatccgattcatccgtcggctgatgatatttacactgcattgtctccttcaatgccgacactttcaaagaccacggtttataatactttgaaattgttttccgaacagggggcggcattaatgcttacgattgacgaaaagaatacaaactttgatgcggatacttctgtacattctcatttcctttgcaaacgttgcggacatatttatgatttgaaatgtccggaagcgattaaacaagtggaaaatctgggaatggatggtcaccaggtatcagaagttcattattattataaaggtatttgcaagaattgcttaagtaaagataaagaaacacgtattgactaattaatttaaaattgagaagaaaatgaaaaaatttagatgtactgtatgcggttacgttcatgaaggtgacgcagctcctgaaaaatgcccattgtgtaaagctcctgccagcaaattcgtagaagttgttgaggtagaaggtggcgcattgtcttttgctgacgaacacgttattggtgtggcaaaaggttgtgacgaagaaatgattaaggacctgaacaatcacttcatgggagaatgtactgaagttggtatgtatttggctatgagccgtcaggcagaccgtgaaggttatcctgaagtagctgaagctttcaaacgttacgcttgggaagaagctgaacatgctgctaagtttgcggaattgttgggcgactgcgtatgggatactaaaacgaacctgcagaaacgtaaagatgctgaacaaggtgcatgcgaagacaaaaaacgtatcgcaactcgtgctaaagctctgaatctggatgctatccatgacactgtacacgaaatgtgcaaagacgaagctcgtcacggtaaaggttttgaaggattgtacaaccgttatttcggtgataagaaataattaagcctaataaactcttaaaaggtctgtattctgcaacgaatacagaccttttttatttatatttgtctatcaatttttaaataccacagttatgagaaaagtacaactattgttagtttgtttaatgctttcggtggctgcttttgctgctgacaaagtgattaaattgccgaagcctaatttaaaccgtaccggtgcggtgatgaaggcattgtctgaacgacattcaactcgcgagtatgcttctaaatcattgagtctgtcggatctgtctgatttgttatgggctgctaatgggataaaccgtaaggaatccggaatgagaacagctccgtcggcgttgaataagcaggatgtggatgtatatgtagtattacctgaaggaagttatctgtatgatgctaaaaatcatcagttgactctggttgctgaaggagatcatcgtggagcagtagccggtggacaggcatttgtgaaaacagctccggtgtccttggtgttaatcagtgatctttccagatttggagatgcgaagagtgcacgcagccagttgatgggggctatggattccggcatcgtttctcaaaatatttcaatattctgttccgctgctaacatagcaacagtgccacgcgcttcgatggacaatgaacaattgaagaaagttttgaaattgaaagatagccaaatgccaatgatgaatcatcctgtgggatacttcaaataaggattggcaagatatacaaaagagtgacggtatcccgcaaggataccgtcactcttttcctattatagcgttactatcccgaccggatagcgtcactatattttcttctttacttcaagagaaattcatcaatcgcttttttgtaagttgccttgtcagcagctccacggaaaagctgtggatctcctttcatgggaatgaatacaaacaatggaatacttgttgcattaaataaagctgccagttctttttgtttatctacattgactttgtagatgacaatttttccggcatattcctttgccaattctttcatgataggagctgtctggcgacatggtccgcaccaatctgcatataagtcgatgatggcgggcttattacctttataattccactcctttgatttctcataatcgaagacgtctttcagaaacatttctttgtccattacgacgacttcaccgttacctgttacctcttttttaccttgattagtttccctactgtcattgaatgcgtatacaattacgcttgccatgacgagggctaccattactaatactttcttcattcgttattattatctttttatgtataatgcttctcgataaccccttgcagttcgctactatggattacgccggaatgtctccagacagcctctccattcttgaacagtataaaggtcggtacagcttgtatgcgatatttagtagccaggtcttcatgctggtcaacgtctatctttgcaatacgtgctttatctcccacaataagttttagttcttctaaaaccggtttcattgctttgcaaggtccacaccattctgcaaagaaatcaactaaaacgggcactggtgactgtattaaatcttcaaatttttccataatcttttctttcttagagttaaaaagcagtctttgaagaccgcaaatataatttctattttattatataacgagaaaaagctgattttgttcatgaaatagtaatcatagagtcatcatcttgtaatgtgaaagagggaattttgcgtatctaaaaataatggaactatgaaatttttatttattgttcaaggtgaggggagagggcattttacacaggcaatcactctcgaagaaatgttattgcgcaatgggcatgaagtagtggaagtcttagtcgggaaaagctcgacacgtactttgccgggatttttcaatcggagtattcatgcaccggtgaagcgattcattagtccgaactttctgcctacggcagataataaacgggcgaacctgacgaaaagctttgcatacaatttattaagattaccggagtatcttcgtagcatgtattatataaatcagcggatcagggagacaggggcggaagttgtcatcaacttctacgagcttttaaccggacttacctatgcactcttccgtccctccgttccgtatatttgtgttgggcatcagtatctgtttttacatcgtgatttcgagtttccggataaaaattcgtgccagttatggatgctgcgtttctttacccggatgaccgctctaagatcttcgaagaaactggctttgtctttcctggaaatggaacaggatgatatgaatcaaatagtgaccgttcctccattgattcgtcaggaagtgaccgctatccgtccggaaaagggtgattatattcatggatatatggttaattccgggtttgctgatagcgtggagagttttcatgcgaaacatccggaagttcctttaacttttttctgggatagatcggatgctgaagaggtgacacggattgacgaaacattgagtttccatcaaatagatgatgtgaagtttcttaatgctatggcgggttgtaaggcttatgccagtacggcaggcttcgagtctatttgcgaagcaatgtatcttggaaaacctgtattaatggttccggcacatattgaacaagactgcaatgcctatgatgcaatgaaagcgggggcaggaataatcagtgattcctttgatttgcagccgttgcttcgttttgcaggagaatatactccgaaccgtcatttcgtttattgggttcgtagctgtgaacgtcggatgatccgtgaactggagaaactggcagcttcacattcagaaataacttcaataccaacattcactaattatttaccaatatgaaactaaacagaacggattatgtgcttgaacgcgcatcagatggtggctactatgcctggttgactgtaaatatgcaatgtaatgcttatggggaatctcctgaagaagcagttcagaatttacagaatataatgaatgagatgattgacgagatgtatatggtggaagagtttatataaattgaaaatagagaattaaaaattgagaaatataatgccagatggcataacttttatttctcaatttttaattctcaactctcaacttactcaatgctaagttcgtcgatgatatgagaggctcctgcgtatttatcgatgataaacaaggtatagcggatgtcaacacaagcggctcgctgcgatgaaggacggaaagcaatgtctcctgttaagccttcaaagttgcggtcgaaagcagttccaaccaactgacctttgctgttaaataccggactaccggagtttcctcctgtattgtcggtgtttacgataaagcagacaggcatttcaccgtttttgccataacgtccataatcctgggatttatataactcttttagcttttgaggcactacgaattcccagtttccctgatcttctttttccatcacacctttgagggtggtatgagcatcatataccacaccgtcagccggttcataagaaagcacctggccgtatgtcaatcgtaaagtagagttcgcatccggataaatcggcgttcctttttcctgtctcatgtccatcatgcctttcacccatactttatgagctgcgtcatagttctgattggcttctttcatggcaatggctgttttcagaattccgtcggtaacagaatatttgaataataccatccagtcatatcctattttatacaaacttggtttcttgataaacttctcaaagtttttaggattgccgaaaatggaatgttcgaaacaggcatcaacgaaggcgtcaatacttcccttgaaacgagaattgatgatttcgaagatgttgattcgttgttctgcaggaatgtagttggcataagtcttcagcatttctttcgctaccatccgttccacgtcggggaaagggacagaagcaaaatacttatcaccttctttcttcagttttagttttgcttcttttatctgctctttatctttcgatttcagagcggtaaccaattctgtcgtggaagggatacgcataaaatcaagggcggtgaccaatgcttcattgatagcctgctgatgatatagcgcatcgcgtcggtgagatacaatagagcgaatctcatcaaaggctttctgatacgaatcatctcccttctcacggccgcgggctaatagttcttcttgctgtgcacgtttggtatccagtacattgaggcgtatcagtccttcattcatgccgattgcatttttccaataattggccgaagaagcatatttgcttgcataatgaatacgcactgccggatctttcagcatttgctccataagtactttctgacgggctccgcgtacatgctggcgcatgaaattggtcgtttgcatccgttcttccacttcgtcggcaatcatataccgccagttacgtccggggaatcccatgacaaaggtgaaatctccttcctgaactccggcgaggctgatcttcagatgttttttcacttgcagaggaacgttgtctttagaatattctgccggttttccattcttgtccgcgtaaatacggaagagagaaaagtcgcctgtgtgacgaggccacatccagttgtcggtatcagctccgaatttaccgatggaagaaggaggagcccctaccatacgaatatcactgtatactgttttgatgaacagataatatttgtttcctccataaaaagccttgagctccaactttgttgcaggagttatttctatattctcggctttggcaaaacgttctgctacgttgccaagataacttggagatagataattaacaccatccgggtccggatcttttttcagttgttcgttgacgtaatccgtcacatcgagaatccggtcgataaaagtgacggtcaatcccggagtagggagttccgcatcacggttcatagcccagaaaccatctgtcagatagtcatgttctacattactatgttgctggatagctccataaccacagtgatggttagtcagtaccagtccttcggaagagataacttctcccgtacatcctcctccgaagtgtacaacagcgtcttttagagaaaggccatttgcgttgtatacttcctctatcggaatttcgagaccaagttcgcgcatggcaacagcgttctgtgctttcagatcggttagcatccacatgccttcgtcggcgtggatgctaagagttgccagtgaaaataggacaaataggatttgctttctcatttattctacgattgtcatttcattgattaggtgtccgcagtttcctaacttttccaaaatgaacaggacataacggatatccaggttaatacaacgttgtaggttgttgtcgaagttgatgtcaccgcttaatgattcccagttgccatcaaaagcgcaaccgatcagttctccgttttcattcagtaccgggctgccggagttaccaccggtgatgtcgttggtcgacaggaagcagacaggcatatcaccatttggcaaagcatagcggccataatctttcttttcgatcagttctttcagtttggcaggtacaacgaattcacggtcttccggattttctttttcaagaatacctttagtggtcgtatagtagttgtagtgtacgccgtctttcggatcataaggtttcacgttaccataggtcagacgaatggtaaagtttgcatccggataagaaggtacaggcaacttcatttcacctagaccacggatataagttttgtgcagcaaagctagttcctgatccatatccttgagctgggaagccagtgtatccatcaagtcgtatttagactggcagtattgtagtgccagatcattgtcaatcgctttcactgaaggcttctttgtaaacttctcgaagtttgcccggttggcaaaaatagagttgtcatacatatcatcaacgaatttgttataatcgcctttatatttctgctcaataaccttataaatagaaggacgttggtttgccggaatcatttcagcatataaggggaacaaggctttcgctaccttgcggtctacttcatgatcgtaatctttgttatggatgctttcgtaagtgctttccaaggctttcatgcgtgcttcgattacagaatcgtttttctcaagcaatgcttcgcgtgttttagtcaacatcacattgccaaattcgatagctccgaagaaagtctctctcaaacaggtgtactgatagttgagaggagttgtcttagctaccaggtcatcaatgttcttcactaccgctgcatattcagcattgttttgtgcttttgcaaactctgcgaatttggcttcttgtgcagcttttgttcccaatacatcattatcgatgatggccttattcatgccgatggagtttttccaatagttgctggaacccgcatacttgttagcatattgaatacggattttgtcactggcattcattacctctttcaggacagccaaacgtgcaccacgaatacggatacgtggatcgttttccgattccatacgttcttttacttctgatacagtcaggtagcggctcgtacttccggggaatcccataatcattgcataatttccttctttcaatcctttgatagagatagacaaatgtttcttggttttcagtgggacgttactctcgctgtattctgcaggttcaccatttgcatctgcataaatacggaacatggaaaagtcaccggtatgacgcggccacatccagttgtctgtttcaccaccaaacttaccgatagaagagggtggagcggctaccatacgtacatccggatatattttcttatagaaaagatagaatttatttccggcatagaacggaagagcttgcggaacaattccctttttgtctgccaggtcacttttaaaataaagatcatgagccagcttttgaaggaatatattgctgaatgattcggattcggtgatttctttcgccgcgatcttggcattgacaatatccgtaatatcttcgatacgttcgataaatgtgaattgcaatcccggagtagggagttctttgtctctggaagtagcccagaaaccatcagtcagataatcgtgctcaacactactatgttgctggatggaggcgtagccacaatggtgattggtcagaatcaaaccttcgggtgagataatttctccggtacatccgcctccgaatatacctacggcatctttaagagaaattccattcggattatataggtcctgtgcttccagttttaatccttgttttttcatcatgtctatggagtgttgctgttgcatcagttgcaatagccacataccctcatccgctttaacggaacatacaaaaagcgcagccagcgctaatagataaagtcttagtctgttcattatttaatgataaaattaaaatatatgattggttagtattcaattttcaaatctccgttcttcagtgcttccatgatattagcaggcggacgttgattcatcagttcgtttttcataaagtccatataaggagctacatgcttaaagaactggtaatagcctttgcataagtaattcaatcccggttcgccttctgccgtttggctgaaacgatttttcgggcattctccgttgcaggcaaacaggaactcacattccttgcattgagtagggagagactgatatttcatgttcccgaaattgtgctgacgctcgctatgcatcatttccaccagagttttactataaatgttgcctaatttatattcgggaaatacaaaatggtcgcatgaataaacatctccgttgaattccatcacgccggcatgaccgcaggtctttgccattgtgcatataccaggctgttcgcccatccagttcgccaaagtcgaatcgaatatttgtacatagtacttgcctacatcttctttcacccattcgtcgaaaagagcacaaaggaagttgccccattgctccggagtgatcgaaaaatcggcaagggttccggctttattttctgcaagagaagcgaggtgacgaccgtcctcatgtgagagaatacgttcaacgataggagcgaactggatatactgacaaccgatttctttgaagaaacgataaaagtctagtggatagtcggcattgaagtcattaataaccgccatcgcattccattccaccccatgttttttcaaaagattgatgccttgcatcactttcacaaaagagggttttcccattttatttttgcgatactcgtcatgaaactcctggggaccatcgatagagactcctaccagccaattattttcacggaagaactcgcaccattcgtcggtgagcatggttccgttggtttggatgcagttgtcgatcgttcgtcctcgggcatactttttttgtagttccatcgcctttttatagaaggagagcggtcgcatcagcgtttctcctccgtgccaggtgaaaagcacctgcggcatggtttgtgagttaatgtactcgtcgataaacttttccagaagttcatcgctcattacgtgtttcagattgtctttgtataggttggccttttccaaatagtagcaataatcgcatgctagattacatacggcacctacaggctttaccattacataaagcggtttggcaaaaggggcaaatgttgatgttttcatgaccgcaaaattagataaactaaatgaaaaaaatagccttatacctatgtttataaggattattaaagaaaagagtcttacaagatttaaatattgataaaatgtttctttgaattctgaatcagttgtacctttgtacccagaatttaatgaatagatgaacgtgaataaaattttgccttttttgcttttgcttccgtttttggcttcctgcaccagtaagtacaagattgaaggaacctcttcagtgaatagtctggatggaaagatgttgtatcttaagtcccttcgtgatggagagtgggtgaagctggattcagctgaagtagtgcatggtctgttctcaatgaaagggaaaatagattccgtacagatggtgacactttatatggatgaagaaagcattatgccgattgtgttggaaagtgggaagataactgttaccattagcaacacggacctcaaggcagtcggaacatctttaaataatgcactgtacgagtttatcagcaaaagaaaccaattggaagaaagcattggtgaactggagcagaaggaaacccgtatggtactggatggaggcgatctggatgaaattcacggtcagttggtggtggaaggagactcactgatgaaagcgatgaatcagtatgtaaagacgttcatctccgataattacgaaaatgtgctgggacccagtgtgtttatgatgctctgcagctctttgccctatcccattatgactccgcagattgatgatataatcaaggatgctccttattcttttaaagataataagctggttagagagtttctgtctaaagcaagagaaaacatgaagttgatagaagaacatcaacgattggaacaaaatgcttcaacaaataagtaatacttgagttttttgtgtatttttgcacaaaactcaagtaaagtgaaaacgactactgtttcggtatacgccgctttcttttttattttagtcttatcggtttcttgtcatagagattcggaggcccctgatgcggcattccagaggattgaaatgtgcatggaatctcttccggatacagctctgtatctattaaagtcaatacctcatactgaaaaattgcgtggaaagttgcaggcggattatgcacttttattgacgcaggcgatggatcagaactatgtgaagtttacttctgactcattgattgcactggcgctgaattactatactgtagagcgtggtgactctgttacgcgtgctaaagcacagtattattatggaagagtgttgcgtgaattgggcaaagatgaagaggctttgacgtttttatcttcggcaaaagaaatgttcgggaatattcaatgttgtaagatgtttgcaatggctactgatgagatagggatgattaaccggaaaaagaaattgtatcaggagtcgttgaagaattttcgggagtcatatacgatctatgaagagttgaaagattctttgagtcttgtcagagccgggcaaaatataggccgggcttatttgtttcagaataaatgggatagctgctatttctattatacttacgctttagaactagccagggaaaagcaatatccgtctgaagtttccattttacatgagttggggatactgtaccgttccatgggagaactgaaaaagtcagaacgctattttcttgcagcttatgaaaaagaaacggatgaagaaaggaaatacgtggagtgtatgtctctcggctatttgtatatacagatgggcgatgcagagaatgcccggaaatattttaagatgagtatcaattcttctaaagaatatacccgtattgacgcatataacaatttatactttcttgaaaaagatattgataattttgaagaagcgattatctaccatgaaaaagcggactctatcgtgaatgtattggatgaagtcgattcgcaggagttgataacagaactgcaaaagcagtacgagaacgagaaactccggaatgataatctacaactgaaagtggaccgtacagtttttatattttgcggtacggttattttcctgattgtggccttctatatgtgttattactactacaaaagtaaaaatcacaggaagaagattgccgaaatcgaatcccagattagagataatgaagaggagataaagcgataccagcaggagatggaagaaatccaggagttgaaagatcaagtactggaagagaaccgcatactggaagaaaatcgaatgaaggtaggcgagttgaatggaaagattgtacttctaagtatgcagaacaaaaccttatcgggactgttgaaagaactgggaggagaattaactgtcggaccctcttctgaacagtacatatccgcttttcgtctgctgcttgctatcaaagagggaacattaagaagtaaattgtctaatggagaacgctataaattgtttagcctgtttgattttctctattctaattacgttacccggttgcttgacaaaactcctttattaactaaacatgatcttgagatctgttgctttcttaaatttggactgaccaatgaagaactggcgcgtatttttcagacctcttccgattctgttaccaaagcaaaaggaaggctgaaaggtcgattaggcatttctccacaagaagatttgaatgtgtttttaagggatttttgataaataaaaaatgaattgtccgggtcattaatagaacgctaatctgtatttgattgaaatgtaagtgcttacgaaaaatcaggcgcactgattttgtccgggtgactttttttgtgttttcggatgcatgctgtacttttgacacaacaaaaaccaaatagctatatgaaaaatcctaatgaattatctgccgcctcttctttgagaggtgacgaattgcagttaatagaacaaaaagccagcattgttgtcggaatagcaaattctcgcaccaggttacggataggaattctattaagtaaatattcagagtatcaggtggattatatatcctccgagagtgagatcggtaaactgattgaagaagccgacttgattattggtgcggggattaccgcttacgaaggggtattgcgccgaaagccggtgattgtagtgggtgattatggcttgggaggtctggttactccggatacattccgcaagcattataacaatcggtttagagggaagattaatggtgtcagaaatgaatctttctcattagagaatttagaaaaggaaatttataaaagttttaatttgacttttcaagaattacaaatgatgtcaaaccaaaccataaccttgcaaaacatctaaatatctgaatttcttaatttaatagtttgatgcataaaactggttaggaatatgggggtgcgtgagcatccccatatttatataagattatgtactgactatcggtcttgatcttcgtttttcaccattcccttgtattgttccggcagggcgctttcaaccgcagcgtaggcctctgccatggttgccttgatattttccattcctttccctttgggaggaataggctcgtgaatagtcagaatcatgcgatgacggtgtatccatttgcctgtgcgtggcagaatctcgaatgagccgtcaatggtgacgggtacaaccgccaactgtaaatcatcagccaactggaaagcgcctttcttaaagtatcccatgtgtcctgtaaatgtacgcgctccttcaggaaagactacgagagaaaccccgtctttcaatgagtcttttgcctgccggattgtttccaatacttttttaggaccagatctgtctacaaagatatgtcctgcactttcacaggcttttcctacaaacggcagtttgcgcaggctttttttcatcatccacttaaagtttcttccgatgaagccataaataaggaaaatatcaaatgaaccctgatggttaggtacgaaaatataggaagtcttgtcatgcaacttttcacgtccctcaatcttcacgggaatcaatagaaacagacaaattaattgtgaccaaatcttccccggataatatccccagatgtgggctcctcccaagagagaacctacaatagtgacgattgccgtgaggatggtcaacactaataaaataggcaaagcgatgcaaatctgataaatataatacagtatcttcatagggttggatttttatcctgcaaatatacatgattattggtaaaaaagagaggcagatgtgatataatctttttgattgtgttatttttgcctcttgttattagagatagttacaaaattatgatacgtatattacatactgccgactggcatctgggacaaaccttttttggttatgatcgcacggaagaacatggagtattcctgaattggctggcagaagaaattcgtcagaaagagattgatgcattgattatagccggagatgtttttgatgtttccaacccttccgcagcatcccaaagcatgtattatcagtttatttatcgggtgacagcagagaatccgtatttgcagattgtcattgttgccggcaatcatgattcggcagcacgcctggaggctcctttgcctctgttgcaagctatgcggacggaagtcagaggggtagttcgcaagctcgaaggcggagaaatcgattatgaccatttgactgtggaactgaagaaccggaaaggggaagtggaattgctttgcatggcagttccttttctgcgtcagggagattatccggccgtgcaaacggaaggcaatccgtatgcggagggagttcgcgaactttatgcacaacttttgcaaaggctatggaagcgaaggacggagaatcaggcgattcttgccatcggtcatttgcaggctacaggatcggaaattgcagagaaggattatagcgagcgtaccgtgattggtgggctggagtgcgtatctccggaaactttttccgaacagatagcttatacggcattgggacatatacataaagcgcagcgagtgtccggaagagagaatgtgcggtatgccggaagtcccattccgatgtcttttgccgagaaacattatcatcatggagtcgtgatggtgactttcgacggaggttgtgcggtggacattgaacggttggaatgcccgaaattaatacctttgttgagtgtcccgaacggagaacctgtttcaccggaagccgtcttggaagccttgaaggaactacccgagacagaagccgtagccccatatctggaagtaaaggtattgttggaggaaccggaacccatgcttcggcaggagattgaagatgcactggcagataaaaactatcggttggcgcgtattgtttctacctatcgcactgaaactggaaatacgacgaaagaaaatgaaaactggaagagggggttgcaggaaatgtctcccttgcagattgcacagtctgcctttgagaagatttatcaggtggaaatgcctgtagaactgacaggtttgtttgaagaggcctatttggctgctacccgtaaagaagaggaggaagaagaatgaaaatactagctatacgattgaagaatctgacctcgatagaaggaacggtagaagtggattttatggcagaaccattacattctgcaggtatctttgccatttcaggacctaccggtgcaggtaagtctactttattagatgccttatgcctggcattgtatgataaggctccccgctttgctacttcagtggaaaatgtgaacctggcagatgtgggagacaatcagattaatcagtctgatgttagaaatttgctgcgccgggggacaagtgatggttatgcggaagtcgattttttaggtattgacggacggcgttaccgttctcgttggtcggtgaggcggacaagaaacaagataaacggttctttgcagtcacaaacgctggaagtgaaagaactggatacggagaaagaatttcaaggtaccaagaaagagttgttgattcagttggtggagttggttggcctgacgtatgaacagttcacccgtacagtattattggcacaaaatgattttgctacatttctgaaatcaaaaggggcggcaaaagcagaattactggagaagttgacaggaaccggtgtgtattcccggatttctcaagaggtctatgcccggaataaggcggcacaagaagaggtgaccttgattcagaatcggatgaatgtgatcgaattgatgccggaagaagagctgcttgctctgcaaaaagagaaagaactatcgactgaaaagcgtgcggcagggattaaactgctggcagaacagaatgaacaactgaatgtggttcgttcattaaaaatacaggaagaactttgtaagaaaaagcagcaggaagaacaggaggaacaggctagggagaaagttctgcagggtgcattggcttcccaagaggaaggattggtgcattttaaggcacaatgggaggccatacagccggacttgaagaaagcacgtcaattggatgtacagatacagtctcaacaaagcagctatatacagtcgcagcagattttacaagcggctaacaggcaggtggcggagcaggaacaaaaaatgcgagtggctgcggaacaattacaggtgtcttattcttctctgaaccgcttattaagccatgtagggatagaagaagcactgcaacttgaacaggtggaagagattctacggcaagaagaaagtaaactggttgccgctaccagtacgaatgaggaacgtttgttgcgcttaaattctttcggatatccgttattggccgaagaacaggtgaagttgcaaaaagagttgactcgtcagcagaatatccggcaattaacggaaacgcagacgaaagcaaagacggaaatagaaagactggagaaagaagtggccaattgtctgaaacaattgacggagcaagaaaccgcattgaaagttactcaacgtctttacgaaaatgcacgtatggcagtgggaaaagacgtgaaagcattgcgccggcaattacaggaaggggaggcttgtccggtttgcggtagcacagcgcatccttatcatcaggaacaggaggtggtagatactcttttccggagtatagagcaggagtataatgtagcatcaaccaactatcagcagatgaataaccggagcattgctctgcaacgtgatttggcgcatcaaaaaacggtggacggacagatcgcggaacagttggcagcattatataaagcagggattgaagccggaaacgaagagcaaatacaacaccgtttggcggaactggcaatacgtattttggaatatcgcaatctttatgcagaatggcagcgcagcgatgaagaaattaaaaagatgcgtgcacattgtgaagccctccgtgagaatgtttctctctgtcgtttggctatgcagaaagtatcgtctgccaaagaacagctggtaatcttacagaatgctgcttcggccgaactaaagagatttgaagtgatagagaaagcgctgaatgtgcttcgtcaggaacgttcgcagctattgaaaggaaaaagtgcggatgaagcggaagctgccgtagcaaaaagagagaaagaactgaatctcgctttggagaaagcacgtaaagaagtagaggcggtacacaaccggctttccggtttgcaaggagagatgaagcaaattgcactagctataggagagttgcaggaacagtataaaaagatagagtctcccgaactgcttcccgaaataataaagaagcaacaggaagaaaacctgaatatagaacgtgccctttctactatggaagcccgcctgctacaacaagcaaagaataaactgactgtggaacagattgcgaaggaactggcagagaaacaaactgttgccgaacgttgggcaaaattgaataaactgattggcagtgcggatggagcgaaatttaaagtgattgctcaaagttatactttgaatttgttgctgcttcatgccaatcaacatttatcctatctctctaaacgctataagctgcaacaggtacccgatacgttggcacttcaggtaatagattgcgatatgtgtgatgaaatacggaccgtgtactctctttcaggaggtgaatcgttcctgatttctttggcactggctttaggtttgtcttccttgtcaagtaataatctgaaagttgaatctctttttattgatgaaggtttcggctctttggatgcggaaagtttgcgtacagcgatggaagcattggaacaattacagatgcaggggcggaaaataggagtaatctctcatgtgcaggagatgagtgaacggatttctgttcaggtgcaggtacataagaaagtgaatggaaaaagtgtgcttaccgtggtggggtaagcacactccttactacttagtatgaattattcaggttggattcttttacattaattcgttcagttcgcttaaattctttttgatttcgtggatacgatttaagaacttcttgcggtaaatccataagatcaatcccagtcctccgccccataacaggatgaagaaagcgatcatccccattccatattgccacacttgccagtagataaatgaaagtatagccaggaccaggagaaaggcaatagcaatcaatcgttccctgatggtccatcgatggatacggttcacgcggctgattacttctaccaaaggcatctcgtctatttgtgtccgttggaggaaacgggtggtgacgatatcccagcaaagggcaggaatccatgcgaaaatgataatgatatagatcgggttcaatctgttgtgcaacagtacctccgctaaaaataagatcagtatcggcagagaaatcagaataagcttgatgttcagtctggcaatggcatggatacctttgtccgcatgccttatcagcttttcaagctcttcttctttgatgaactctttgtctttcaagtgttcatccagggcattccaagattttttaagttcttccagttccatatatcttattcctcctttttcattcttttaagtttgtctttgatgcgacttagtttggtcgctacattggtaaccgtcagtccggtgatttctgctatttcctcgtaacttttgtcttcgagataaagcaggataattgatttgtcgagttgtcccagttggttaatcatctgataaagctgtttcaacatttcgttgatcgggtcgtgtgcttctatggcccagtcggtatctctggtgaggctgactatttccggcacattcttttctttacgatagaagctgatacaggtgttgagggcaatacggtaaatccaggtggaaaccttacattcttttctgaatttgggataggctttccaaaggttcaataccacatcctgatacagatcattgagaggagcattgggattggcatacagatagcataccttgtagatcacccgttcatattcgcggatcaccgacaaaaactcttgttcaataggggcgctaacctctgctgtttgttctctcatggaatctatgattacttttctggttagttagtcgtgagaaaaggagaaaaatcacaggggaataaggactattggagattagctgccagaaacttacacatttcttcgatactttttccccgacggcgggcataatcttccaattggtcttctccaatctttccgacggagaagtattcggaagccgggtgtgagaacataagcccgcaaacagaagcgtgcgggtacatagctccgttttcggtcagcgaaatgcctatctgcttcatgtccaacagttcatccagcaggaagttgacagattgatccggtaaagacgggtagccgacagcaggacgaatgccctgatacttttcgaccagtaagtccgctatgcctaaattctcgtctttggcatatccccacgcttctttgcgcacatattcatgcatcttttctgttgctgcttctgccagtcggtcggagagggtttggacaagcaggtgtttataagggtcctgttcgtacaatccttccatgtccgcatcaatggaagaggcaaaagcaccgatggtatccgggatgccggaagagatcgggcggataaagtcacttagacaaagaaaaggactaccgtctcttttcggcgtttgctggcgcagtaaaggaaaagtgatgaaccggtctttttctttctcaataatcaggttatccccgtcagagtttgccttgcaaagcttgaagatggtctttacttcataatcccggtcaagcagatcgagcatccggttggcctctttgaatagctgcattgcttcggaagctttattacgttcttcttccgggaaagttgtcagccacgaagcacggcaggcatcacatccgtgaatgttggcgatggctgcaaaacgtggctggaacccccatgcatggaaaaagtaaatccagttgatgtagggagtgactgtatgtattttataagataaaatggtactcataggcttgttgaaggcgagctgctgtttatctgaatcttaattcctgtccgcgataagtctcgtctatttctccgttgttatataacagatgtccgtttacaaatgttttctctactttccagtcgaatgtgtgtccctctaatgggctccatttacatttgcttagaatacaatcggttgttacagtccattcgcttccgggacggactaataccaggtcagcctgatagcctttgcgaatgaatcctctgttttgtatctcatacatctgcgcaggagcatgagccatcttttctactactttttcgatagtaaacactcctttttctgtcaactccaacatgctgacgagtgagaactgaatcatcggcattccggacattgcttttaaggcaccgccttctttttcgctaagtaaatgtggggcatgatctgtggcaatagcatcaatcaaaccgctattgacagcctctcgcaaagctttccggtcttgcgctgtcttaatggcagggttgcatttgatgcgggcacccagtgtctggtagtcctcttccgtaaagagcagatgagaaacacaggcttctgccgtgatctttttttgtaccaaaggtacattagaaaacaggctcaactctttagctgtggaaatatgcatgatgtgcaggcgggcgtttgtctcacgtgccaactgcactgccagttcggatgaacgatagcaagcttcttccgaacgaaggagcggatgaagagccaaaggtacgtcgtctccgtattctttcttatatttatccgtgttttctttgataattccctgatcttcgcaatgagcagcgatgagcagatcggttccaccgaatatattacgcagactggccatccggtctaccagcatattgccggtgcttgaacccataaataacttcactccacaaacccggtgtttatccagttgtgcaaactgggtatagttattattcgttgctccgaaatagcaggaatagttgactgctgacttttcacccaacagaacaaatttttcctccaaagcctccaatgtggtagtttgcggattggtattgggcatatccatgatagaggtgacacctcctgctgccgcagcacgactttctgtggtgatatctgccttatgagtcagtccgggatcgcggaaatgcacatgttcgtcgatggcacccggcaaaagataacacccggttgcgtctattatctcgtcgcagggggcagttgcgttttctccgccaaccaatatttcggctatcttttcattctcgattactactgaacccagaacttttcttccttcgttgacaacaacggcgttttgaatcagtgtacgtttcatttcttttgtgggaatttatggaaccaactatttacttttaattttatcacaccaaatatggcttctccaaagatgctgctattcattttagaagtccctaattcacgattaatgaagataacgggaacctcgataattttgaaaccacacttgtaagcagtgaatttcatttcaatctgaaaggcatatcctttgaagcgaatatgatctaaatcgattgtttccaacacctggcggcggtagcaaacaaatccggcagtggtgtcatgtacaggtattccggtgataaaccgcacatatttagaggcaaagtatgacatcaatacccgtcccatcggccaattcactacattcactccgctgacataacgggaaccgatggatacatctcctccttgttccgaacaagcctgatacaaacggggtaaatcattcggattatgactgaagtctgcatccatttcaaaaatatactcgtatgcgtgttccagtgcccatttaaatccagtaatgtaggcagtacccagtcccagttttcctttacgttctatcatgaaaagctgttcgggaaattcttgttgcagttttcttacgatggctgccgttccgtccggagagccgtcttctatgaccagaatatggaatacttggggaaggccgaaaacggcacggatgatattttctatgttctcccgttcattataggtggggataattacaatgctatccgatgtctgcatatagatactataaaatttagaaacaaaagtagttctttttcctttagttatagctgaactaaggaaaatttaacgtgtttcatgccccatgcggaataagacggcagataccttattataatacttctgttctttgggtgcatactcccaatcttttttgtaattttgcggggaaattttataggtatgacaataactgagttgcaacaacaatatgctgcccatcccaatatggcagtaatgaagcgcttgttgaaggacacttccgttcagactgttttttgcggaggactgtgtgcatccgccgcttctcttttttcttctgtactggtgcaagagggtggttgcccgtttgtatttattttaggtgatcttgaagaagccggatatttctatcacgacttgacgcagatattgggtacggaaagagtattgttctttccatcttcattccgtcgctccatcaagtatggacaaaaagatgcggccaatgagattttgcgtacagaagtacttagccgcttgcaaaagggggaagagggattatgtatcgttacgtacccggatgcattggcggagaaagtggtgtcgcgcaaggaattgagtaataaaacgctgaagctgaatgtaggagagaaagtggataccactttcatcaccgatgtgttgcatagttatggttttgaatatgtagactacgtatatgagccgggacaatatgctgttcgcggtagtattatcgacgttttctcttttgcttcggaatatccttatcgcatcgatttctttggtgatgaagtggaaagtgttcgtacctttgaagtggagtctcaattatcccgtgagaagaaagatggagtgtctatcgttcccgatttggcggtgacaggagatgtaacgacttcttttctggattttatcccgaaagagactaccttggcgatgcgcgattttctttggttgcgcgagcgaatccaggtggtacacgatgaggcgctgactccacaggcaatagccgttcaggaggccgaagagaatggtggcattacattggaagggaaattgatagacggcagcgagtttactgtacgggcactcgatttccgccggttggaatttggtaataaaccgaccggaacgcccaatgccagcgttactttcaatacatctgcccagcctatctttcataagaatttcgatctggtagcttcttcttttaaggattatctggaaaaaggctattcgctttatatctgcagtgacagcatgaagcaaacagatcgtatcaaagctatttttgaagatcggggtgataagattaattttactcccgtagaacgtaccattcacgaaggttttgtagataacacactgcggctctgtatcttcacagaccatcagttgtttgatcgttttcataaatataatctgaaaagtgataaagcccgttcgggaaaagtggcactatccttgaaagaactgaatcagttcactccgggagactatgtggtgcatacggatcatggtatcggacgtttttccggcttggtacgtattccgaatggtgacactacgcaagaggttttgaaactggtgtttcaaaatgaagatgtggtgttcgtctctattcattccctgcataaggtttccaaatataaaggtaaagaaggagaggctccccggcttaacaaattaggtacaggtgcatgggagaaactgaaagaacgtacgaagagtaaaatcaaggacattgcccgcgatttgataaaattgtattcgcagcgtcgtcaggaaaaaggtttctcttacagtcccgatagtttcttgcagcgtgagctggaagcatcctttatttatgaagatacaccggatcagagtaaggcgacgattgatgtcaaggcagatatggaaagtgaccgcccgatggaccgtctagtctgtggcgatgtaggatttggaaaaacagaagttgcgattcgtgcggctttcaaagctgttgccgataataaacaagtagccgttctggttccgacaacagtacttgcttaccagcattttcagactttccgtgaacgtctgaaaggcttgccgtgtcgggtggaatatttaagccgcgcacgtactgccgcacagaccaaagctgtattgaagggattgaaagatggagatgtcggtattctgataggtacccaccgtatcttgggaaaagatgtccagtttaaagacttgggattgttgattgtggacgaagaacagaaattcggtgtctctgtcaaagaaaagctgcgccagttgaaagtgaatgtggatacactgactatgactgctactccaattccccgtacccttcaattttcattgatgggtgcacgcgacttgagtgtgatttctactccgccacccaaccgctatccgattcagaccgaagtgcatacttttaatgaagaagtgataacggatgccatcaattttgagatgagccgcaacggtcaagtcttctttgtcaataaccggattgcgaacttgccggaattgaaagcgatgatcgaacgtcatatcccggattgccgtgtagcgattggacatggacagatggaaccgacagagctggagaagattattctggattttgtcaactacgactatgatgtactcttggcaactacaatcatcgaaagtggtattgatattccgaatgccaacactatcattatcaatcaggcgcaaaactttggattgagtgatctccatcagatgcgtggacgggtaggacgtagtaataaaaaagctttttgttatctgctggctcctccgttaggtagtttgacagccgaaggaaggcgacgtcttcaagcaattgaaaactttagtgatttgggaagtggcattcatatcgccatgcaggatttggatattcgtggagccggaaatctgcttggagccgaacaaagcggatttgttgccgatttgggatatgagacatatcagaaaattcttactgaagctgtccatgagttaaagacagacgagtttgcagaactgtatgcggatgaaatcaagggcgaaggacaaattagtggagaagagtttgtagacgagtgtcaggtagaaagcgacctcgaactattgttgcctgccaactacgtaacaggcagcagcgaacgtatgttgctctatcgcgaactggatggactgacattggacaaagatgtggaagctttccgtgctcgtctggaagaccgcttcggaccggttccccgggaaacggaagaactactccgtattgtgcctctacgccgtcttgcagcccgtttgggtgcagagaaaatcttcctgaaaggtgggcggatgaccttgttttttgtttccaatccggatagtccgttctatcaaagtaaggcttttggtaaagtgatagactatatgatgaaatatactcgtcgttgtgatttgcgtgaacagaacggcagacggagtatgctgattaaggatgttactaatgtggaaacggcggtcagtgtgttgcaggagattgtggctttgccggtaaaggaagcataaatgagttgaagatgctatcattggcaacaactcattactatgtagcttttatttctttctcttacctatattattttttcgattgactaatgagttttcgtttgacagttgttgaactatcgtttgactattgtcaaacgaaaacttactaggtaatcaaatacatatcaattggagagcgctaacttaaaagtagccaataagatcacaagttataattgattcataatcatgccttatgcttgatttataatttatttcattctatctttttcctttccctctttccatgtcctttctttttccgtataacttgtctatcaaatctgaacgtccgatacgtctcaactcattgatgatgttttttcgttcttccggtttgtaccagaaaaagaattggcgttgtgcaagtttctcccgttgggttttggcactgaatatcggttctagcgtgtatggatggaatccgctataccaggcttcggtagccactgtcatcggagtaggagtgaagtcctgcacttgttccaggtggaagtccagacgtttggtgataacggcaagttccgccatgtcttcttcattgcatccgggatgcgaagagataaaatacggaatcagttgttgacgcagattttcttcccggttaatgcggtcgaatatctttttgaatgtttcaaattgctcaaaagaaggtttgcgcattatagataatacccggtcactggtatgctccggagccacttttaaccggccactcacatgattgactatcaattcacgggtatattcggcagtgctacggttggtagtttcatctttgctttgatgaagtaacaggtcatagcgtacaccgctaccgataaacgattttttgattccggacaaggcatctactgcacggtaaatatccagtaggggacgatgatctgtatttagattcgggcaaactttcgggtgaatacatgacggtcgtttgcacttcttgcaaatagcttcatctttccctttcatctgatacatattagcggaaggaccgcccaaatcacttaaatatcctttgaaatcgggtaattgaataacctcttttacctctttcagtatagactctttgcttcgactgacaataaactttccctgatgggcggaaatggtacagaatgcacaaccaccaaaacatccccgatgaatgttgatggaaaatttaatcatatcgtatgccggaatccgttttcctttatatttggggtgaggcagacgggtatatggtaaatcaaacgaatgatcgaggtctttctggctcatcggaggatagggaggattgactacgactatcttattccctactgcttgtgtgattcgtgaagccgaatatttgttggattcttcttcgatatgtcggaagttactagcctgtttctttttatctgccaaacattcttcgtgtgaataaagttgaaggtcatcttcggcagatgtccattctgttgcacgacaaagataggctgtctggggcacagatccgataattgttctaaatttgctacttgtcagtacaggttcttcagtggtgagcaggcttttcatatttttcaccaggtctgcaagaggcttttctcccattccgtagatgagcagatctgctccgctgtcgcacaaaatactcttttgtactttgtcctgccaataatcgtaatgactcaatcgccttaaactagcttcgattcctccaatgactaccggaacatccggaaaaagtttctttagtatctggctgtaaactgtagaaggatagtccgggcgcatatccggtcggccgtccggagtataagcatcttcactgcgtaggcgtttgttggcggtatatttattaaccattgagtccatgcatccgccggagataccgaagaatagccgtggacgtcccaacttcttgaagtcgcgcaggtcgtcacgccagttaggttggggaacgatggctattttcaaaccttccgcttcgagaatgcgtccgataacggcagcaccaaaagaaggatgatccacataagcatcagcactgaatagaacgacatccaattcattccatccgcgaagttcaacttcttttttggtagtgggtaaccagtcggtcaatcgatattctttcatgctgcaaagatacggataataaaaaacatcccaatgatttttttattcattgagatgtttaacttcaatcatcaggatgttttcttccaatcattggagtgttttcttaaaacttcccgttgattgtgaactgtaatgtcatttgttctccgtcatagatttcacggaagccgataccttgctcggacagatattcctttagatcctgaaacgcatcagcatggttcatgataatctctattgtttcacccggagaggcagtgcacatcgcttttattgcaggaatcagcggactgtatgctgttattccgcaggtatctaccgtaatcattattcctcctcttcttccgcttccggactggagagccaggtaagataaagcttgatgagctgttgcaagccgaatgccttcatattattgtgataaatcacgtcaatacaaaggtccagcaagtctttactgtcttcctcctgactggcgataagggagcggatatttagtttcaacttatccagaactgcttcatctacaataccggtactgtcgataagatgacggaacagggcatatttttcaatcgttctcaagttttcattagatacttctatgctgcgtgtaccgctgggatttgcttgtatagtatacattgttttttagttttaaaggttattatagtagcaaagatagaatttaaaatgagaaacggattaaaaaaaaggatattttttatttttgagtaaagaatcccaagatgcctgccataatggttgcccgatccgcttccgactggatgctttcaaaaggaaagcccaatacaaaagtgcggtagttccctttgtaggcaatacctgcactctgattgccgggtgcatacgtaaatacggggaaggcagtatctacgggaacaatacaatcggcagcaggtacagcataactgctttcattaggcagacgtgggattgtaatagtacggcccaatcctttaatctgattcgaactcttatccgtcaggctaccttgataaccatatttcagtattttctccgtaaactcccggtttccttgtgttccactcatatcacttcctacataagcaccactgacaaacaggttacctcccgcttggcaataactggtcataatccgttgcatagccgaagagaatgtcttgtaatatgctttacttgcaggatcttctttttccagtcccaaaatataatctactactggataatcttctaatgtaaccaatccgttctctactgcttcgtcgctgcatgatacgaaactatattttccggctgcctgaattgcttttccgtgaataaaaggatagtcgaacgtgtttcctgcaattttcattccttctaattcgtttccgctatgtcccagacttccttttccttctttaccggcttgtgtacggtcgaagccggtttgtgctccgcaaaatgaaatattcgatatatacggaacgccgggatcttgcattagatcgaatccagctttatcagaagtgttaacgaccgccggaccgctgattctgtcaaagccattgatgatgattacttttccctgttcacgtttggctttatagacagaaaggatttcagaaggaaaactttccccaccccggtttacagcagttactttgaatgaataaacaagtcccggttctatcttaacggtgtgggacgttttgctgactaaagtgccattgtcaaaacctccataaccgatgcgggtatatacaatgtattcccgtggtcgtgcagtcggttcttgcggatcgtcttcgcctttccatgaaagttctaatgtattctttttctttccaaattgaatggcgaaattgctcacaggcagaggctgaacaatgtattctttatcgtgctggttggtaatgaactgcaaaatacctttgtaaatggcacgccccactgtaaacttgaagttcggatcatgtcctaactgcatatctgcgaagttctggtgggagagtaattcaataatcgtggaaggtgtagccggaagacgtgtttcgctataattccggttccacatgctgcggcgtgtccacggcaagctgtagcttgaataaatatctttctgaatctgtgtcagcagaatgtctgccagatcacgtgaggcataccggtctgttcctgcattcagtttgccattattgaaatcggtggtgtaaatgccgagtgatccgatcagttcgtctgttttgctgcatccggcgtcactgtgtaatgccatcgtcatttccaaaggtatgcccagacccgactgttgtgggttatagacggaactgcccgataaataattgataacgttagagcgtgtgttaatatcgtctgtatagtcgttttcaccttttcgtccggcatatacttcgtatggcattcccgcccattgagcagaatagcgtgctccttccaagtaacgcggtagcccactgattcttcctccgcgggcaatgtttcccattcctcctccaaaacgtactgcatcggcacatacaactccatgttcgctgctctcgttactaagaaccaccataccgtagtcattgttccctttgtcgaattcaaaagtgccgagataaacccatgtgcctccacctatcttttggtttactttgaattcggtaactccaccgttatgaaataccagatatttggcgtcgcttacactgttgggtaatgtctggtaggaaacataaacagcatacttgcctgttgccggcagagtaggcacccattcggcaaatacctggtctttattcttctttttctttctctctgtcggaataaaacgacaggttccgtcagtgaaaggattttctccatctttatagattgttttcttctgagcaaatccttttaccggagcatttgcccaattaatctttttaccccccatttccaaataaagggaagcattgggggtatcattatctacaatgatttcattcttttgtgtatctcgttcgcggggagtatagacaatcgctcctgcattttccagcattggaattacataaggaaggacaaaagattgagtgaacatgtcttctgtggtgcagaataatcggggacgttgccatccccattcgtttttatcatttttgaaatagttgccgtggctttgccagattgcaatgtggcggtcttgtagtccgcgtgagatttcattaggacgtgaagtgtttttcacccagggagctcctttataatctacatttaaggataaccgctccttatcctttttcttattccggtagaaattaggtaccaaatcttcaatgggtttcccatccgcataaatggtgagttggtaataatgaacgggacccggaagcaattctttaacttgattataaatgttttctacagtttccggacggaaaggctggtaggcgaaactctccgatgcatagattgcaatcgtcttacggtcgtaattaatatcgaagctattcagtttaggagtgctgattttggctgttgcggtatattggttgaagtaatccgtcagccgctcttttacatttctttcaatatcctgcgcaaaaagaaaagttgcacagaatgtaaggcctagaaaaaatactattattttcttcatacttgttgcttttttgctaaatgcagattatcacggattatcgcagattgttttattctatttttctttgcgaaaatctgcgttaatccgcgtttaattctccccgcaaaaataaacaaaaaagagcgagaagtatcgaaacttcccactcttctttcattgttttatattctcttaattaagaatgattactcttataatggaacatattctacaaatgcttccattgcttcgtaagaagccaatcccaattgatcgtacaaagtagctgtaccacggttacgatcttcgctacgttgccagaacaaacgttcgtcgttacccaggaacggagcactttccatttgcgactgatgtttcaggatagagttacgttttgcacgaagttcttccggactgataggcactgccatttcaatattctcgatttcccattcagcccacgcaccacggtacatccagatacgacagtcttttagccatttggcaccttcttctttttcaagatcgacagcagcaaatacagcgtctgtacatacacggtgagttccatgtgggtcggctaaatcaccagcaacaaaaatctggtgaggttttatttcacggagcaagttgcgtacaatttctacgtctgcttcactgattgggtttttctgaatcttacctgtttcatagaatggcagatcgaggaagtggcaacgttccagcggtatattattataagtacaagctgtacgggcttcaccacgacgaatcagacctttgatagtcagaatatcacgactgtccatatcaccgtctttcttctccttcaggaaattgcgtatttctatatatttttcattgataaccaaatcttcgctattattgaagagctgattgaatccattgataaaatgcatgaaacgaactacttcttcgtcacctacggcgatattaccggaagtttcgtaagctacgtgtacttcgtgcttttgttctaccaaacggcgaagcgtaccacccattgaaataacatcatcatccggatgcggagagaagatgaccacacgtttcggatacggttttgcgcgttccggacgataggtatcatcagcattaggcttaccgcccggccatccggtaatggtgtgctgcaaatcattgaagattttgatatttacattgtacgcagaaccgtaaagtgccagaagttcactcaaaccgttttcgttatagtctttatttgtcaacttcaaaatcggtttgccggtcaactgacacaaccaaacgattgcactgcggattaatttatcattccattcgcaagaagtgactaaccatggacgttggatacgtgtcaggttcatagcggctgaaagatcaagagctacatgtgcattattgtgagtttgcagataagaagcaggaattgtgtcagtgatcggaccttccacacactctttaatcatagctgctttgttttcaccccatgcaagcagataaactttctttgcgccaagaatagtagctactcccattgtaatggagctgatcggcgtattatccagcgttccgaaaatcttggatgcctcgtttcgtgatgcattatctaacaaaatcagacgagtggtagaattcagtcgggaacccggttcgttgaacgcaatgttacctacacgaccaatccctaacaaagcaatatcaatacctccgaagctttcaatgcgttgttcatacagacggcaatattcgaagatggtatctttggcaatgcttccatcgggagtgaatatattctgcttgtcaatgtcgatgtgatccagcagcatactcttcaaagcattgaagttactgttgattgcatcgggagacaacggataatactcatacatattaaatacgatcacattgcggaagctaagtccctcttccttatgcatacggataagctcggtatatacgtggctgggtgaatctcctccgggaagagccaatacacagaaacgtcctgccttttgtttctcgcggatggtttgtgctatttcgcgcgcaatatagttagcaccttcttctacggattcgtagatgtccgtagggattttttcgagtcttgtcaagactgatttttcaaatgcattctccggtctgtagtatctgggggagacccggtggagactgatttgagaactaagatttgttttcataaagttgttaattaagttatgtaagattagcgtccttacgactgtattttcacgacaaagatacaaaagaagtctatataattaactaccgagttctaggtattgttgctgcaagaatctgtttttaacatttgttattttgccaatgttacagatggaattcgtctgcatctttccataccgggaacttctctctgaattggttgagagtgttcagattaagactcacagtagctattccttccttttcatctggaaatgagccgatttcttctccgaaagcagaataaactctacttcctccattatatgtaagctgatatccgtctatacccaccctgttgacaccgcatacatagcattgattttccaaagcacgcgcccggagcagagtgtcccaaaccagacggcgggggataggccagttggctacatatattaaaaggtcgtactcgttgtttacgttccggctccatacaggaaaacggagatcatagcaaaccaacaggcagatattccatccacgataggggatgataagtcgtttgtcaccgaccgaaaaatgttcggcttcccttcccatacgaaacaggtgacgtttgtcataatagaattcttctccttccggtgtcaggaagaaggcccgattatagaactggtcgttttcagttgctatataacttccacaaatggctagctgaaattgggcagcccattgtttgagtattgtaatggttgctccggagttcggctctgccagcattttactctgcatgctgaatccggtggaaaacatctccggtaaaacaacaatctccgttattccacgaagactttgcagcttttcgtggagcaaacggagattttcttgtttattttcccaaacaatatcggtttgtatgatagaaatacggatagactccatgataactaagtattaagtaataagtattaagtattaagtattaagccgtgcggataagtatatcaaaagctacgattaatacttaatacctaatacttaaatcatatttctccaagagcaaaattctccggatgttttcctttgaaatccttgaaataaagtttgatttctctcatgtccttattaatatctcctgacggcatgatagctttcgttgccgaaatcgttttcttgctgtaatcaataccaatcaggacgataggaacctgtgctttcaaagctataaaataaaaaccttttttccagtttggattcgctttgcgggttccttcgggagtgatagccaaattaaactttttatatttagcaaaattatgaaccatctgatctactagcgaagtttttcggctacggttgacgggaattccgccaactgctttgaaaaaaactccaagtggaaagaaaaaccattcttttttcatcatgaaacttgtcttacggcctatagcaccataaaatagttttccaataaataaatcaaggtttgttgtgtgtggagcggcacatatcacgcatttatcataattaggcaccgtaacgtttgtcttccatcctaacaggcggtaatagataaagctataaattgcttttttcattctgttgttagttcaatttccctatagcttcaataatctcgtttacctttgcattaaaatcagcacggaatttcttataaaaacctttcacgttgcccggttctgtgtggctgatgcgagtgacaaactcatcctgcatcttcagtacctctgccatcagttcatctgcttttaccttgtctgtgccagggataaacatactgttgattaaacactcggtgaataattctcctgcgatatagtttacgttctttttgagttctcttctacttgccataatctttacatttaatggtgaataataaaaatacttgcggtaaagataggcactttctttgattctagcgaataatatagggaaaaacattattcaggccttcatcttcttaactctatctcttcatttaaataatttcacaggctattattgatggaataacggtttgattgtgatcctgaatagtatttatatgatttacttgttaatctgcgtttcaataaattcctatttagttcatttcggatcactaatgagtaatttatttagttcaacagttgatagggtaagtcacttacttaaccaatgttggttatgtatgagccaaatgttatttttagtgaagcggtagcccgagaaataatatagaatttacctaacggacaaacgtacgttatctaccgtgtgaatatccgttacccaccggacgagcatcaacaacctgccggacgagagtcggtcatctgccggacgaacaactcatgagggacacgggaatagaaacggcaccgacaaagtgatccggaccgacagcggtagcaaccaaagccattttctctgccctatattattgctattatttataacagaaataatacttttctcttctctactttactctactggttttcgttggcttttccccctttactggcaggcgtttcagcgctttgtacagccctctttggataccctcgtttttgtatcggtttcacttgttttctcaccgaagtacaagaataactttcacgtgaatgacggtgtttctcttatttttcttttttataatagctgcaatcataaagtaggttatttttgttctttctcttaatttattgtataatctaaaataactaatgatgcaaaaaattaataaaaatggatttagccaatgtgccggagcgtacattgagcgtttgcggaaagaagggcgatattctaccgctcatgtttataagaatgctcttttttcttttagtaagttttgtggaacattgaacatatcgttcaggcaagtcacgcgagaatgtttacgttgctatggacagcatctttacgagtccggattaaagctcaatacgatttctacttatatgcgtatgcttcgtagtatctacaatcggggagtagaagcgggaagtgccccttatgttccccggttgtttcatgatgtttatacaggcgtggatatccggcaaaagaaagcattgtctgtgaccgagttacacaaacttctatatgaggatccgaaatccgaacgtttgcgtcgtacgcagacgattgccgctttaatgtttcagttttgtggaatgtcattcgcagatttggcgcatttagagaagtcggctttagaccggaatgtgcttcaatataatcgtatcaagactaaaacaccaatgagcctggaaattctcgaaagtgcaaaggagatgatgaatcagcttcgaagcaataaacctgctcttcctgattgtcccgactatttattcgatattttacatagtgataagaagcgaaaagatgaaaaagcatataaggaatatcagtctgctcttcgtagatttaataattgtttgaaggatttggcgagagcgttgcgcttaaattcgcctgtcacttcatatactttccgacattcttgggccactactgccaaataccgcggagtttctattgaaatgataagtgaatcgttggggcacaaatctattaaaaccacacaaatatatctgaaaggctttggattaagagaacgtacagaagtaaatagaaagaatttatcttacgttagagattgcaatgcaggcaggtgatatatagacaaaactttaataatcagcatttaaatgtatctgttacttcttaggtaacggaatcaaatatgacgcaaagatagacaaaaatataaatagcaaacaaatattctcccattttttttcgttttatctgatgcatacggcaaaaaaaaatccgaacatgaaataattatatcttcatgcccaatgatttatatgtcctgttttaaaaagaattttccccttcgctaaaggcaaaagctcttctctcactgtaattgtcgatgtttttctctgttctcattccggttggtctcgattgtgtgtttactgttacctaagaagtaacagaattatataaggtaaaaatagtggattaatcaaaaaagttttgagaatatctctatttaaaagtataacatacaaataaagatgaaacaaactaaagcggcttttaggaataagccatttatttcgttaaaaggtagtattctatttctgatactcattccgatgagcggtctgattcatgcgcaatattccatgggaacaacggggcagttgatgatacctaccgctgaaatgcaagagaccggtacatttacgggaggagtcaatttcttaccagaacaggttactccatcggttttcagtttccctaccatgaactattttgtagatatgactcttttctcttttatcgaattcacttatcggatgacattactcaaaatgacaaccggcacaggcagaacgggttatcataatcaggaccgttctaatacgattcgcattcgtccaataaaagaaagccgctattttccggctgttgtgattggtggagatgatcttttgactgagaagaagactccatattggggagcttattatggtgtgttgacaaagactatcggatttcgttcaggagatcaattggctgtcacagccggatggtatattcatcaaggcgattgccgggtatttaataaaggacctttcggaggtgtccgttacacgccttctttttgcaaagaattgaaattgatggtggaatatgatacgcatggatggaatatgggggctgccatgcgcttttggaagcatttgtccgtcaatgtgtttactcgtgaatttacgtgtgtttccgctggtctgcggtatgaatgtacattaatacattaaaagaagatgaaaaggattgttagtgtgactgctgtttttctctgtggtatttctttgttacaggcacagccagttcgtgtgagtgagacactgaaagaattggaaatggagaatatttcagttgtggagaaaagggacacgataactgcggcttttgagacctctgcctatagaggtatttataatggaatcggtattgctatacgccatttggttgctataccggaaataccgactttgcagctacttatattagataatgccctaccacaattatgtataactatccctgcagatttgattcaaaaatgtcagtccggtgaatgtacgttggatgaagtgtatcgtaagatggggatgactacttctaccggaactgctgtgcgtcagctgaaaggtgtaaaacgaaaagaaagttctttcggtaaggtagattttgtgatatatcccaacgtgatgttagtcaataatgtaacttataagttgtataaggcggcactcgagttgcaacctgccctggaaatgcaattatggaaaggagcttcgctacggatgcaggtttctttgcctattgtaagtaatgaagatggtaagtggaactgcgttcgcttgggattcatggctttgcgtcaggattttcgcttggctaaccattggaaaggatacctcactggcggtagtttctctaatgaccgtcagggacttgctgcaggaatcggctatttttcagcaaacggcaggtggacggtagaaggtggaggaggaattaccggttcttcccatttctatggcagtgactggaaaatgagtaagtggaaaagagtcaatggacagattagcgtaggatattatgtgccggaagtgaataccttggtgaaagtagaaggggcccgctttatttatggagattatggagtacgcggaactctttcacgctatttcggcgaatatattgtaggtatatatggtatgtacacagatggagcaacgaatgcagggtttaatttctctattccattaccgggaaagaaacgcaggcgacatctgctacgggtgatgcttcccgaatattttgcttttcagtatgatatgcgtagcgggaatgaatacgctcatcgttcattgggcgaaagttatagtgttgaacctaagtcggcagagaattcacacttctggcagccggattatattcgatattatttgattagaacgagtgagaagtgaaacatgattgatatttaaactagtatttttaacaaatttgaacattatgaaaagtgtaaaatggttttatgtgggtgccatggcgatagccttgggtatgttaacttttgcgacagtagcctgtcacgatgatgatgacgatccgaaaccggcagaaggggaagttgttgaaactccgaaaccggttgtagagtattacattatggggacggtgacttccggaggagcagcaatggatggggcaaaggtaaaagtgggtagtaaaaattacacaaccgactcgaatggtaagttctctgttacagaaagtgctacaggtacttatagtattgaagcgtcttctaatggatatctttcacagaaaacgtcagttgtcattgcaaataatgcagagaatcgtagtgtggtaacggtagctctggctttgacaaaggagagtccgaaaactgctgtgtcaatagaggctacaggagaaactaaagtagaggataatagtgaatcgaatcaggcaattgaaaagccgggagaagttgctccggaagaagtggtagaggataaaccgctcgtgaaagtcgaactgacaataccggaagatgcaattgaggcatctcaacaacaagcaggaattgttgaagatggtaaagtcaacattagtgtgacaacctttgttcctgctcctgaagaagtaactactgaagtaaaggcagaggacgtgaatagagatgtacctaaaagcatacctttagctgctgctaaatttgaaccgtctggtttgaaatttaagaagtctgttacgatttctattcctaatcctatccctggaataacattcgctgatgctgatatgatacttacttatcagaatccaaatacaggagaatggggggatgcaaaagataataatggaaatgtaattaaaaatatatcttctactacagaaagtggagctgtcactgcatatacagccgaagtcgatcacttctctgcttatgctatagagaataaagtatatagcaagattagtaatgaaactgtgacaactaatattctaggacaagctagtcgtgataatagcgagaatgctaaagcggtggctggcattgaactgaaatataaggaaaagtctggttgggactatgataagaatgatgctggtcttgttgctgaagttaaatcgcaattaggagctggtgctagtgctgaagatacaaaaacggtgaatgcaatggttgcttttatgaaaactcgtatgttctcattaatgggatcggtatctggcattacggaaactgaacgtgtttataacactgtaaatgtaaacggatatactaccatgagttatacttgctatgcaaaagtccgtactaccacgttgacggctaatgtaaagtttaagggtactgcaaagtctgtttcgattacagcaactcgttataccggtacggaccatcaatataaaacggttacttataatccgacacatagcggtggtaagggtggtagtatctaagatgttttatagtaaggggcttagattcatttgtagcattgaatccctgccttagtcgattagaaaaaagtacagaggtacttctttacctaattggccccatgcatcagattttattttgatgcacatttccccaaatatcaactgtctgtgaagatcgttgatatgactttgataccgtttgtcaagttgatggcagtataataagtttttaattattcattttaagataaaacccttttgaatatgctccttttccaataaaccctttggggcatgttcatatagagtatagaaggaggaggtcactgtgaagcggtctcctcttttgcttttcgaaaatactgtattacattagaagtaataccctaaattcacaaagcaacttcctttgtccgtctgattggaatatcccaatgatatttccaatggcccgaagatactgtccattccatagcctgcactgataccgaataattgcttgcctttcaatatatcgaagaaattactatctgttagtccgtagttacccgtcagtgtaagataatgaatggctcccatgcgttgtctgaacttaatagatgcaatcataatggtgttatccatcaattccagattggtaaccccggcaaatggtaattgctgtggaatatagaaaccaggtacgtcaccgccaatggcattttgcagcgggtagggaaaatctcttccgatcaggatacgtccataaatggaaggaatgatagagaaacggcgggttacaggaatgacgcttgcccacgaagcattcagtgctgaaaatggagcgtgttcgttgtattgtgccatattatccgtatagagtgaataggcggctctgaagtcacttcctttagaagggaaacgtcctttatcataggtattatattgcacttgggcaaaataacttagaaagtgttcggattctactttcaggtcggaaatttcaggtttcttgaacaagaaatctttgtatttgtaatattcaaaacgaagaccgagtccgaaacggaaattcttgtaccatacatcagagaagccgaattcggccagatgatatttgtaagttgtattataggcacggtcgccttcctcgtaaatattgatatcattgtattggaacatatacgagaagttgaaattacgctgttgcattggttccagcgtatagtctatgcgggcagcatatcgtttacccaaccgaccggtaagagccaggcgggaaggaatacgagttttgaggtctgctgttgcattgaccaacaaagatgcgatctcttccgaatcgaaacggatgcccaggttgattcttctttcatatttttcctgtaacaggaagttgaggtgataaccttcaggtgtctctttcaacgtataactggcactggagtaggactgactgccacgtaactgatacagggcctgttctatttgttgagtggaaatatcgctgttttctttcagattacatttcttcatcaaccattttttatcatccacctctacaccggaaaatgagatgtccgtcacataaaccgtacgcgcattagaaagagaagaataaggaccatgttgtttcggggtataatcttcggctattcctattttctttttcaaagcaagcaatgaaccccattgggcttttgctgcttcttcgcctctacgcatcagggtatcaatggcggctggagtaaaactggcggatgaatatccatctacattgacacggatataggtatctgtgagatctacatttttttcatggttagactgacaggtgatatctacaatttgtcccagaatgtcggggacgctattgagcttgtcagccttcttcagagcattctgtacgtctactccgataataatatcggcccccatggctttcacaacatctgccggatagttgtttacaatgccaccgtccactaataccatactgtcttgccgtaccggagtaaatacaccggggatagccatactggcacgcatggcagtagagagtattccgtcatggaatacaatttgttctccattaacaacattggctgctacacaggcaaaaggaatgggaagtttattaaagtcgatagagtcatgataccctacggtaaggtctgaaaatagattagccagattctgtcctttcatgattcctccggtagcggcatctttgggagttttggtgaaaggaatagagactgtatatttttcagatcgctcacgatctgttaatgacatggcacttcttttgatacggtcactcaataggaatgtccaatcttgttttcgtaccatgctatccaattgttccggagtataaccgatggcataaagaccgcctacgatagctcccatgctggtgccggctatataatcaataggaattccggcttcttcgatcacttgcagtgctttgatgtgtgccattcctttagcaccgccgccgcttagaacgacacctaccttttttctttgttcctgagaatgcaaagaaaaaggcaataagatgccaattgataaaactaatgttgaaaagatttgttttttcattaggacatggtctagtattgatgtttaatataatacaaatgtagagcataatttgtttagttgttgaaatgggaattaaaaaaaatgttccaaaagtcggaaatgtggataatttctacattttatctggtggattctacatttctacatttcttaaggcaaaatataatagactgaataccagtaaataataggtgtaatgaattttggcatactaattgcaagaaagagtatagaacaaacataagttaaattaaataataagattcgatatgagattattcttttcgaaacatgagttgaaactgaggagaaagagaaccattgctgctattatatgtgtggtacttgtgttgggtgtgtattggatactgacccgacctcagaaggctgcgccggaaatgccgacagtcattgtagaaccggtagtgaaagatgatgtagagatatacggggagtatgtagggcgtattcgtgcccaacagttcgtcgaagtccgtgcccgggtggaaggctatctggaaaatatgctttttgccgaaggtacatatgtcaataagaatcaggttttgtttgtcattaatcaggaccagtatcgtgccaaagctgataaggccagagcgcagttgaaaaaagacgaagcgcaggctttgaaggcggagcgtgatttaaaacgtatccgtccgttgtttgagcagaatgctgcaagccagttggatttggataatgcggaagctgcttatgaaagtgctgaggcaacggtagccatgagtgaggcggatttggcacaggctgaattggagctgggctacaccattgtccgttcgcctttgtcgggacacattagtgaaagaaatgtggatttgggtacgttagtgggacccgggggaaaatcattgcttgctactattgtgaagagtgatacggtgttggttgattttagtatgacggcactcgattatctgaagagtaaagaaagaaatattaatttgggacagcaggattctacccgttcctggcagcccaatattaccataacattggcagataacacagtctatccattcaaaggatacgtggattttgccgaaccccaggtggatcctcaaaccggcactttctctgtacgtgcagaaatgcctaatccgaaacaagtattgttgccgggacagtttacaaaggtgaaattgttgctggatgttcgtgaaggagcactcgttgttccaatgaaagccgttaccatcgaaaagggtggagcatatatttataccatgcgcagggataatgcagtagagaaacgttttatcgaattaggaccggaagtcgggaataatgtggtggtagaaagaggattggcagaaggagaaatggtagttgtagaagggttccataagttgactccgggtatgaaagtacgggtgagccaaccggatgcagaagcccaggatagtataactgcgacaaaaaatgaagtggccggggcgaaagaaaatgttaccggaacgaaggataacgcgaaaggagaataaacgatgaaagttactttttttatagataggccggtcttttcggctgtaatctccatcgtgattgtgattgtcggtattattggtctgacgatgcttccggtggatcaatacccgcagattactcctccggtggtgaagattagtgcttcttatccgggtgcgagtgcacttactgtatcacaggcagtagctaccccgattgagcaggaaatcaatggtactccggggatgctttatatggaatcaaatagttctaactccggaggtttttcggcaacagttacttttgatgtatctgctgatccggatttggcagctgttgagattcagaatcgtgtgaaactggcagaatcccgtttgccggcggaagtgattcagaatggtatttcggtagaaaaacaggctcccagtcagttgatgacgctttgtttgacttctaccgacccaaagttcgatgagatttacttgagtaactttgctaccatcaatgtgctcgatgtgattcgccgtattcccggagtgggacgtgtatccaatatcggtagccgttattatgccatgcagatatgggcgcagccggataagctggcaaacttcggactgaccgtacaggatttgcagaatgcattgaaagatcagaatcgtgaatcagcagcgggtgtgctgggacaacagcctgtacaaggattggatatcacgattcctatcacgacacagggacgtctttccactgtaggacaatttgaagatatcgtagtacgtgccaatgcgaatggttctatcattcgattgaaagatgtggcacgtgtatcgctggaagcttcttcgtataatacagagagtggtatcaacggtgaaaatgctgccgtgcttggtatttatatgttaccgggtgctaatgcgatggaagtggccgagagagtaaaagaggcaatggatgagattagtaagaactttccggagggattgagctatgagattccgttcgatatgacgacttatatttccgaatctatccatgaagtatataagacgttgtttgaagcgttggtattggtggttctggtagtttatttatccttgcagagctggcgtgcaacgttgattccggtagtggcggtgcctatttcattgatcggtactttcggattcatgttgattttcggtttctcattgaatatcctgacattgctcggattgatccttgcgatcggtattgtggtggatgatgcgattgtggtggtggaaggtgtggaacatatcatggaaacggagcacctaagtccttatgaagctacgaaaaaagcgatgaacggacttgccagtgctttgattgccacttcgctggtattggcggctgtgttcgtcccggttagctttttaagtgggattacaggacagttgtatcgccagtttacggtgacaattgtagtatccgtgcttatttctacggtcgtggctctgacattgagtccggtgatgtgttcgctgattctgaaaccggatagcgggaagaaaaagaatatcgttttccggaagattaatgaatggctgggtatcggtagtaataagtatgtagctgccgtaactcgtacaattaagcatcctcgtcgagttttgagtgcttttggtatggtgttgattgctatcatgttgattcatcgcattattccgaccagtttcttacctgtggaagatcagggatatttcaagattgaattggaactgccggaaggggctactctggaacgtacccgtatcgtgacagagcgtgccattgcttatctggaaaagaacccgtacattgagtatatacagaatgtaacgggaagtagtcctcgtgtcggaagtaaccagggacgtgcagaactgacggtgatcctgaaaccttgggaggaacggaagagtaccactattgagaagatcatgcatacggtagagaaacatcttgaggaatatccggaatgtaaagtctatctgtccactcctccggttattccggggctcggtagttcgggaggttttgagatgcagctggaagctcgtggagaagccacttttgataatttggtagacgcgacagatacattaatgtactacgcatccaaacgcaaagagttggcgggcttgtcatcttctttgcagtcggaaatcccacaactctattttgatgtggatcgagacaaagtgaagatgctgggtgtacctttggctgatgtgttttctaccatgaaggcttataccggttcggtttatgtgaacgactttaatatgttcaaccgtatatataaggtttatattcaggcagaagctccttatcgcgaacacaaagacaatattaatttgttttttgtgaaagcctccaatggagcgatggtaccattgacttctctgggaaatgcatcatataccacaggaccgggaagtatcaaacgtttcaatatgtttactacggccgttattcgtggagcagctgcgcaaggatatagttccggacaggcgatggagatcatggaacagattgcccgcgatcatcttcccgataatatcggactggaatggagcggcctttcctatcaggagaagcaggcgggaggtcagacgggtatggtgatggcactggtattcttgttcgttttcctcttccttgctgcacaatacgaaagttggacagtgcctattgctgtgttgctttctttacctgtggctgctttgggagcctatttgggagtatgggtttgcggattggaaaacgatgtctatttccagattggcttggttatgttggtcggacttgccgctaagaatgcaattttgattgtagagttcgcaaaggtgcaggtagataaaggtgaagacttggtgcaatcggccatatacgcagccaaattgcgtttccgtccgattctgatgacctctcttgcctttgtgctcggtatgcttccgatggtactggcaagtggtccgggttcggcaagccggcaggcaatcggtacaggtgtatttttcggaatgatatttgccatcgtatttggtatcattcttgtgccgttcttctttgtgatggtgtataaaacaaagtcgaaaatcttaaaacataagaaataatgaaacgaaagaaactatatattgctatcctgttacttgccggagtactgacttcctgcaaggtagggaaaagctatgtccgtcctgatcttcatttacccgacagcttggaaagatcacaggattcggttagcttcggtgaccaggactggagggatatttatacagatgctacattgagaagtctgatagagcgtgcattggatcataataaagatatgctgattgctgctgcccgtgtgaaagaaatggctgcgcagaaacgaatttctacggctgcattgcttccggatattaaaggaaaagtgacaggggaacgcgaactcgagaatcatggaggagatgctttcaagagatcggatacctttgaagcacaattcctcgtttcgtgggaagtcgatctttggggaaatctgcgttgggcgcgttcggccagcattgccgagtatctgcaatctattgaagcacaacgtgcattgcagatgacgattgtggctgaagtggcacaggcttactatgaactggtagctttggatacagagcttgatattgtcaaacagacattgaaagcccgtgaagaaggggtgcgcctggcgcgtatccggtttgccggtggattgacttccgagacttcctatcgacaggcacaagtggagttggcacgtacggccactttggttcctgacttggaacgtaaaatctccctgaaagagaacgatattgcttatcttgcgggtgaatatcctaataagatagcccgttcccgtttgcttcaggagtttaattctccggaaacacttcctgtagggttgccgtctactttgttggaacgccgtcccgacattcgtcaggcagagcagaaattgattgctgccaatgcaaaagtaggagtggcctatacgaatatgttcccgcgtcttgccctgacaggtggtttcggtagtgaaagtacttctttgtcggaactcttgaaatctccctatgcagttatggaaggagctttattaactcctatctttggttggggaaagaaccgtgcggcattgaaagcgaaaaaggctgcttatgaggctgaagtacatagttatgagaaatccgtactggaagctttcaaggaaacacgtaatgcgattgtcaacttcaacaagattaaggaagtgtacgaacttcgtgccaatctggaacgttcagccaagagctacatggacctggcacaattacagtacatcaatggagtcatcaactatctggatgtgttggatgcccaacgtggatactttgatgcccaaatcggattgagtaatgccattcgtgacgagttgattgcggtggttcaactttataaggctcttggcggaggctgggagcagaatccctagaattatattataaattagctcgctgaagaaaacgtaaaggctatctcctacgtcgggagatagccttaatttttctttcttctttcttttgtcttaaaaacaacagaagaagaatttttataattcggaaaaaaatgcgaaatttgcaacgcttttcaagtttgacaagaaacttactaacacctttaaataaaaaattaaagaaaatgactaaaagtgcattgcaaatcgcaagggctgcttaccagcccaaacttccgaaagcattggcatcaggagctgttaaggctgtagcaggtgctgctactcaatctgtagccgatcaggaagctatcaaagcattattcccgaacacgtatggaatgccgttgattacattcgaagctggtgaagctgttgctcttcccgctatgaatgtaggtgtaattctttccggtggtcaggctccgggcggacacaatgtaatctccggtttgttcgatggtatcaagaaattgaacccggaaaacaaattatatggttttattctgggtcctggtggtctggtagatcacaactatatggagctgactgctgatatcatcgacgaataccgtaacacaggtggtttcgatatcatcggttccggacgtacgaagctggaagctgaaagccagtttgaaaaaggacttgaaatcatcaaacaactgggcatcaaggcactggttattattggtggggacgactctaatacaaatgcttgtgtattggctgaatactatgctgctaagaagtatggtgtacaggtaatcggttgcccgaaaacaattgacggtgacttgaagaacgatatgattgaaacttctttcggtttcgatacagcttgtaagacttatgctgaagtaatcggtaacatccaacgtgactgtaactctgcacgtaaatactggcacttcatcaaattgatgggtcgttcggcttctcacatcgcactggaatgtgctttgcaagtacagcctaacgtatgtatcatttcagaagaagtggaagcaaaagatatgtctttggacgatgtagtaacatctatcgctaaagtggtagcagaccgtgcagcacaaggacacaacttcggtacagttttgattccggaaggattggtagagttcattcctgccatgaaacgtctgattgctgaattgaatgacttcctggctgctaatgctgaagaattcggtcagattaagaaatctcaccaacgtgattatatcatccgcaaactttctccggaaaactctgctatttatgctagtctgccggaaggtgttgcccgtcagttgactttggatcgtgacccgcacggaaacgttcaggtatcattgatcgaaactgaaaaactgttgtctgaaatggtagctactaagttggctgcatggaaagaagaaggcaagtatgttggtaaatttgctgctcaacaccacttcttcggttatgaaggacgttgtgctgctccgtcaaactttgacgctgactattgctactctttgggttacacagcttctatgttgattgctaacggtaagactggttatatgtcttctgtacgtaacacaacagctcctgctgccgaatggattgctggtggtgtgcctattactatgatgatgaacatggaacgtcgtcacggtgaaatgaagccggttatccagaaagcattggtaaaactggatggtgctcctttcaaagcatttgcttcacagcgcgaacgttgggctatcgaaacggattatgtatatccgggtccgatccaatacttcggtcctacagaagtttgcgaccaggcaactaagactttgcaactggaacaagctaaataaatacacttcagagcagttgttgatacaacagttgcaatgaagggttctttcaggcacggattacgcggattaatacggtttttagttatttcttataaccctgtattccgtgtaatccgtgcctatctctaaaaacattgatcgtttaaagtaaatgccgcaacgcaacaacccgatgtctgccgtacagaagaaaagaactgtttccactaccaaaagaaagggaacgacttcttcttccaagacttcccgtacctcaaaaaaggaacaggtgaagcatcgaactgtgatgcctacctggcttcgtaatattctggcagtgataattgtcggttgtttctccgtcgctttctattatttctttatccgcccttatgcttatcgatggaaaccttgccatggcttaaaggaatatggtgtctgcatccctgacggatatgatattcatggtattgacatttctcactatcagggaaagattgactggaagaagctgttgcagaataaagagacggctactcctttgcattttgtctttatgaaggcaacagaaggaggagatcataacgataccacatttgaggcaaattttgccaatgcccgtaatcatggatttatccgtggcgcttatcatttttatattccaagcacggatgctttgaaacaggcggacttctttattcgcacggtaaaacttgtttccggtgatttacctcccgtacttgatgtagaagtgaccgggcggaaggaaaaaaaggaattacagcaaggcatcaaacgctggctcgaccgggtggaatctcattatggagtgaagcctattctttatacctcttataaatttaaaacccgttatctggacgactctatcttcaatgcatacccttactggattgcccattattatgtggactctgtgcggtatcagggaaaatggcacttttggcaacatacggatgtaggaagtgtccccggcattaaagaagacgtagatttgaatgtgttcaatggctcgttagaggaacttaaaaagctgacaattaagtaacgggtatttcttttccctacaacttatctcttctcatatttgttataatcgtattattactaaaaaaaaacgattatgaactttgatatagctattattggtggtggtccggccgggtacacagctgccgaacgggcaggggccaacggattaaaggccgttctttttgagaaaaaggcaatggggggagtatgtctcaatgaggggtgtattcctactaaaactttgttatattctgctaaaatactggatagcatcaagagtgcttccaaatacggcgtttctgccgaatctccttcgttcgatttatccaagattatgagccgtaaagataaaacagtaaaaatgttgacgggcggtgtgaagatgactgtgagttcttacggagtggctattatagaaaaggaagctctgatagaaggagagaaagaggggaaaatacaaatcacttgtgacggagaaacctattccgtgaaatatttgctggtatgtaccggctctgatacagtgattcctcccataccggggctgtcagaaatcagctattggacttccaaggaggccttggagataaaggaactccctaagacactggtcattattggtggcggagtgatcgggatggagtttgcttctttcttcaacagtatgggcgtgaaagtacatgtggtagaaatgatgccggagattctgggagcgatggataaggaaaccagtggtatgcttcgtgccgaatatgccaaacggggagtcactttctatttgaatacgaaagtggtggaagtaaatcctcatggagttgtgatagaaaaagaaggcaagacgtctactattgaagcggagaagatcttgcttagtgtaggacgtaaggcaaatctatccaaggtaggactggacaagctgaatatagaactgcatcggaatggagtgaaagtagacgaacatctgttgacttcacatcctcgtgtatatgcgtgtggtgatattacaggctactctttattggcgcatactgctatccgtgaagcggaagtcgccatcaatcatattttaggagtggaagaccggatgaattacgattgtgttccgggagtcgtttataccaaccctgaagtggcgggagtgggaaagacggaagaagaactggtaaaatcaggagttccttaccgtgtttcaaaattaccgatggcttattccggacggttcgttgcggagaatgaacagggaaacggactctgtaagctgattcaggatgaagatgggaagattatcggttgtcacatgttgggaaatccggcatcagaacttattgtgatagcaggtattgctattcagagagggtacacggtggaggaattccagaagactgtgtttccacatcctacggttggagagatttatcacgaaattatgttttaactcttattccgcttgatctatgattcgatgtatctatagtccgtttactgatatttactttcacttggcagcagaagagtatctgttgaagcagggaaatgaaaatattttcatgctttggcaggatactccttctgtggtaataggtaagcatcagcggttgcggtcggaagtcgataagaaatgggcggaacaggaacaagtacatattgcccgtcgtttttcgggtgggggagcggtgtaccatgatttgggcaatatcaatctgacttttatagaaacggctccccgattgccggaatttgttacgtacttgcaacggacattggatttcctgaactctataggcctgatggcaaaaggaggcgaacgactggggatttatctgaatggattgaaaatatcagggagtgcgcaatgcgtacataagaatcgggtgttgtatcattgcactttattgtatgatacggatctgacagcattgcataaagctttgaatccggaaccgatggttgatgatgaaactttatcgtcagtatatgccgttccttccgttcggagtgaggtaaccaatattcggagttatttaccggagggaactgtaactgattttaaagagaaggcttttcagtatttcagtaagtcccaatctgtcagtgcttttaccgggaaggaaatagaggctgttaatcagctccgggaagggaaatatattcagaaagagtggatatatagtcgttgatgtccgggctggctttgtcagcatccggttaaaatttacttaacttaaaactttctatttcagcccgttgttgtaatatatcaaggttgaataataaatttactgtctatgtcaaaattcgaaataaaaatgcctaagttgggcgagagtataaccgaagggacaatcgtctcttggtctgtaaaggtaggtgatatgattcaggaagacgatgtgctttttgaagtgaatactgccaaagtaagtgcggagatcccttctcccgtagcgggaaaagtggtggagattttatataaggagggcgatacggttgctgtaggaacagtagtcgctataattgatttggatggagaagaatcttcaggaacggagccggtaagcgaaggagttgtaagagaggaagccgatgctggtcaggttgctgcaaatgtttctgaaacatcaccatcatcaccatcatcagcggaaactgctaaaaacgaatcagcgaatactgcatcgaaacctgttgttgcagaggaagaacgttggtactctcctgttgtgattcagttggcgcgggaagctaaaattccgaaagaagagctggatgctatacaaggaactggttatgaagggcgattgagtaagaaagatataaaagattatattgaaaagaagaaaagaggaggtagtgttgaaccgaagccggcatctgttgttgctgccccggccgcaagcaaaacatcagttgctgtttcttctgaacaggcaagtccgaaggttgctcctgtagcaatgcctggagtcgaagtaaaagagatggatcgtgtccgccggattattgccgaccacatggttatgtctaagaaagtatctcctcacgtgaccaatgtagtagaagtagacgttaccaaattggtacgttggcgtgaaaagaataaagacgctttcttccgtcgcgaaggagtgagactgacttatatgcctgtgataacggaagccgtggcaaaagcattggctgcctatccacaggtgaatgtatcggtagatggatacaatattcttttcaaaaagcatattaatgtcggtattgccgtctctttgaatgatggaaatctgattgttcctgtggtgcatgatgccgatcatctgaatctgaacgggttggctgttgccatcgattctctggccttgaaagcaagggataacaaattaatgccggaagatattgatgggggtacatttacgataaccaattttggtacattcaagagcctgttcggtacgccaatcattaatcagccgcaagtagctatcctgggagtaggatatattgagaagaaacctgctgttgtagaaactccggagggtgatacgattgcaatccggcataaaatgtacttgtctttgtcctacgatcatcgggtagtagatggaatgttgggaggtaacttcctgcattttatagccgactatctcgaaaattggaaaggctgataactgattgtttcattcattaagaacttcattactcatgaaaaagaaatatgatataaaaactacagatgtagaaaccctgaaaaagtggtatcatctgatgacattggggcgtgccttggacgaaaaggcaccgtcttacctgttgcaatctttgggttggtcttatcatgctccctatgcagggcatgatggtattcaacttgctgtcggtcaggtattcaccctcggtgaagatttcctgttcccatactaccgggatatgttaaccgtgctttccgccggaatgaccgctgaagaagttatcctgaacggtatttccaaagcaacggacccgggtagcggaggacgtcacatgtcgaaccatttcgccaaaccggaatggcacattgaaaacatctcctctgctactggtacacacgaccttcacgcagcaggtgtggccagagcaatggtatattatggacataaaggcgtagctatcacttctcacggagagtcggctacttccgaaggattcgtttacgaagctatcaatggtgccagcctcgaacgtcttccggtgatttttgtaatacaagataatgggtatggtatttccgtacccaaatcggaacagactgccaaccgtaaagtagccgaaaacttctcgggcttcaagaacctgaagattatctattgtaacggaaaggatgtattcgattcgatgaatgctatgaccgaagcgcgggaatatgctatcagtacccgtaatccggttattgtgcaggcgaattgtgtccggatcggttcgcactccaattcagataaacacaccttgtatcgggatgagaatgaattggaatatgtgaaagatgctgatcccttgatgaagttccgccggatgctgctgcgttataaacgtctgaccgaggaagaactgcaacaaatagaagctgatgcaaagaaagaattgtctgctgccaaccggaaggctttggctgctcccgatcccgatcctaaaagcatttatgattttgtaatgcccgaaccttatcagccacagaaatataaagatggtacacatgaggcggaaggggagaagacttttctggtcaatgccattaatgaaacattgaaagctgaattccgctataatcccgatacctttatttggggacaggatgtggcaaacagggaaaaaggaggcgtgtttaatgtaaccaaaggtatgcagcaggaattcggcgaagcccgtgtattcagtgcaccgattgcggaagattatattgtaggcaccgccaatggaatgagtcgctttgatcctaaaattcatgtggtgattgagggagcggagtttgccgattatttctggcctgccgtagaacaatatgtggagtgtacacatgagtactggcgtagcaatgggaaattcgctccgaatataactctgcgtctggcttccggtggctatatcggtggaggcttgtatcattctcaaaacctggagggagctttgaccactttaccgggggcacgtattgtctgcccgtcttttgcggatgatgctgccggattacttcgtaccagtatgcgatccaaaggcttcacgctgttccttgaaccgaaagcattgtataattcggtagaagcagcggcagtagtgccggaagattttgaagtacctttcggaaaagcacgtattcgtcgtgagggatcagatttaagcattattacctatggcaataccacccatttctgtctgcacgcagcagaacgattggaaaaagaaggtggctggaaagtggaagtcattgatattcgctccttgattccgttggataaagaggcgatattcgaatcggtcaagaaaacgagcaaggcattggtggttcatgaagataaagtattctccggttttggtgcggagcttgctgctatgattagtggagagatgttccgctatctcgatggaccggtgcagcgtgtcggttctacttttactcctgtcggttttaatccgattttggaaaaggaaattttgccggatgaggccaagatatacgaggctgcccggagattattggaatattaaatagtgtggattatgaaaaagataggtttattttatgctaccaaagccgaaagaacgagttgggtggcagagaaaatacagaaagaattcggtaaggaaaagatagagacagtgcctattgaacaggcttggcaaaatgactttgctgcttatgactgcttcattgtgggtgcttccacttggtttgatggagaacttcctacttattgggatgaactgttgccggaactccggacaatgaaattaaaaggtaagaaggttgctattttcggtctgggagatcagatacgctatccggagaattttgcagatggaatcggtctgttggcggaggtatttgaagaagatgaggctactttagttggttttacttcttccgaaggttatactttcgaacgttccaaagctttgcgtggtgagcagtggtgcggtttagttgtcgatttggataatcagtccgagcaggcggaaaagaaaataaaagcatggtgtcaacagctaaagaaagagttcgcgtaacaactttgtttctccttataagatagtgacgctatccgatacaaatagtgacggtatatgcttgggatagcgtcactatcccaagcatataccgtcactattttttctacatccatcaggactcttatcctttataaacaaacttcacctctgcccagcgattcttctctttataatgaacgaaagtcaatccgttcttttccgcttcttcgcggatggcggtaatatcgtctacgtaaaatccactcatatagagttcggaatccgtatgcatggaggcaacatattgcttcatatcattcagtaatatattccggttgatgttggcgatgataacgtcgaaaggtccttttcctgtaagcgacgaggcatctccttgtgaaacggcaatatcgtctacgtggttcaattcgatattttcgatggagtttcgtacacaccattcatcaatgtcgatggctgtacaggggcgtgcgccccgcatacgtgcgaggatggcaagaattgaagttccgcagcccatatcgagcagagatttatctttcaattcgctgtccaacaattcttcaatgatgaggctggtagtctcgtggtgtcctgttccgaaggccatttgaggattgatgacaatgtcatattccgctttgggaatatcttggtggaaagtgctgtgaatcacacatcggtttccgataatgatgggttgaaagaaattcttttcccattcttcattccagtccttatcttccgcttcggtgtatgtataagtaatatccgtatcgggtagggggaactcggtgatggcaatcttgatggcgttttcatcacagattgtctgttggatatatgcggtcagtccgccttcacactcaacaaaactttcaaacccgacttcacccagtacggcagccagtacgtcagtgacgatttctgtgcaagggtgggtgcggaatgtgaactcaaaatacttcatagttgtttttaattctggtgaataatggacaaagatagttagaaatagggatttccctattatcctttggggaaaatctccctcggacgaaaaatctcttccttatctttgtaacatgaataagtttaagtaattacataaaccgagatgatatgaaaaagattgtttatttcttgctatttgccttgtgcctcccgataggcttgatggcacaaagcgttgatgacgacctttacttcattccttcaaaagacaaacaggagaagaaagaaactccggttaagaaggaaacgaagaaacaggtgaccaacatctatacttcaccgggtactacagtagtggttcaggaccgtaagggaagaacacgggatgtggatgaatataaccgccgttacgatgcacgtgataatgaattcgtaatggataatgataccttatatataaaagaaaaatctaatccggatttggacggagaatgggtgacaggcgaattcaatggtacggaagacgactatgaatacgctgaacgtatcatccgtttccgcaatcctcgttttgctatcagcatcagcagcccgttgtattgggatgtagtttacggtccgaattcatgggactggaatgtatataccgacggtatgtatgcttatgcgttcccgacattcagtaatccactctggtgggattggcgttatggctcttacggctggggatggaactatggctggggatggaatcgtccttactacgcttggggatattctccgggttattggggcggctggtatggcggccactggggtggctggtatggcggtggctattggggacatcatcaccactggcacggtggtcctagctggggctggggcggaggtggaagcggtcattggacaggtcctacctatacaaaccgtcgttcttccggacaaagcagttacaggaatccttccactgttcgtcgttatggttcgagtgcagttcgttccagtggttcttctgttcggggaggctctgcagttcgttcagaaggtagttctgttcgttcttctggttctacttatagcaggggaactacttccaggcgtgtagtgggtacacggacttcaggtgaacgcagtggctcaagtagtcgtagcagtgctacttattctcgtccaagtagtactagaagtagcggaagttcttcatcttcccgttcgactggttcttctggttattcgcgttcgtccggaaccactactaggagcagtagtgcaagatcaacttatagtcgtggtagttcagaagcaccgcgtagttattctccagcgaataatagtaatacccgttcttcttcctatggtacttctcgttcttcttcacgtagttattctccagcttcgtcaggtggtagtagttctcggggcagttattcgagtggtggttcttctaggtcatcatcaggtggaggctcctctcgtagtggcagtgccagaagataagtattaattaaacggttttacaagaatgaaaaagataagtgttttaattgctctagggatgttgatgatagcgccttggggaatggcacaaacgatatatgatggtgccaaattaacaggaaaagatttaaatggaactgctcgatttgtgggtatgggtggagctatgggagctcttggaggagacatatctacaatggggactaatccggcaggtattggtctttatcgtagtagtgatgtaatgacttcatttgggttttctctttatgggaatgaaagtcagtatttggggaaaaagtttaattccgatttaactaaaggagattttaataacatcgggtttgtgttttcttcgaagattggtaatgaaactccgctgcgttttgtgaatttcggttttaactatcataaagcgaaatcatttaataacaacatgcgcatggaaggtaatttggggctttactcccaaacctatctaatggcatctcaagcagctggcattgaaaaatggggagattcgccttatacggataatggtattgggtggctttctattcttggagctgatgctgggctgattagagatattacaatacatgacaaaacaggaggggtaaacaatattccttatacctataaggatgaacaagggaaggaggtacagtataaggatataaatggtaatcctctttatatctctcctggacattttgaaggaatgttagataatggatatgcaaattttcgttcggaagaacgcggaggaattgaccaatatgattttaatgtatcgtttaattttaatgatcgggtatatttagggttgacgctgggtgcttattctgtagattataataagtatactttttatgatgaggattatggaaacgatgaaggatatagtttgcagagttggaatagaataaaggggtctggctttgacgtgaagttgggggctattattcgtccttttgaatattcgccttttcgagttggattagctatacatacgccaatattctatagtttggattataaaacgagtgcacaagttatatcggatgtgatggatgttgtaactggagaaataaaaggatatgacgtgagatcatgggataatcttccgggaaaaggggatatgattcttcctttcgattttcaaactccttggacttataatgtaagtttaggatatacggtgggtaagagtttggctttgggagcagagtatgagtatcaagattattcttccatgaaatttaaagataccgaaggtaattcttctgcttatgaatttgaaaatagtacgacatctatgttgaaaggggttagtactgttcgtcttggtttggagtataaagtgattccacagtttgcttttagggcaggatataattatagtactgcggctttccatcaagatgctttcaaagatttggctattaactctattcagacagatacagactttgccaattctaaatcaatgagtaattatacattgggtattggttatcgcggatcaatgttttatgctgatttagcttataaatactctacatataaagaaaacttctatccgtttgtgaatggatttacagatgaagatggtagtacaatcattggttcaccagaagcaacgaaagttacgaatacacgcagtcaagtgttgtttaccgtaggtatgcgcttctaatctaataaagagacagttttcaatttcaataataacttttgtgtgtaaaaaatccctggaatgctgagtgtctacagcggttccggggatttttattagtatcactttttattctttagtcttatctgaatagtggagttcgttcgtcaatgattccgcgtcttgcgtacatttttaccgcaacaggagttccggcttctatggtaatgtcctcctctgcgatgataggttcttctttaccgtcctccaggataaccgttcctattttctcgccggctttgatgatctgtggaatcaagttagtcaagataccttcagatactttccgaatatcaatgtattccggttttgcattggggtcagcttcgattttgccgctgaacaagtcctgtacacctttgttcttcaagaacagtttaacgattgctctaccttcgtacggctggttgttctcgtcgagcagaacgacgggcgttgtcattctcttgaatgcaagagcaacattcttagaacctttgttggcttgggctgtaccgaacaaatattctaagccacccttgatttcacgatagcggctgctcaatgatctggtagtagctgcttcgtcggtcaattcaggataatgagcatagaaagtaaccgtttccgaatcggtgcctgcctcgttccaggtctggctatccatacctatggcaaatggatgataatcctgctcggcaacggacattgagatgacatctccggcagcgaaattgttctttaacggaagtgtcaaactactgctgttacgagtaagagcattgttgatactttggtcaatagaagtagaaaagtcgatcacttctttactgggatcttgcagttcttcttgctgttgacaactgaacaggcatactgatgccataacaaataaaaggctttttcttttcatttgaggggtaattaataggttaataatagtgagaggttttttaatattctactctgtcttctttggccgcccaggctttgaaggcagtaagggcttcattatgcaataagatttcggaaggaagctttctgtcttcaggcttcagttccagttcgtcatagataaaagagtcgtcgaagccaatattcttggcatcggtcttattgtttccatagtacattttatccaatcgcgcccagtaaatcgcaccgagacacatgggacaaggttcgcaggaagtatagatttcgtatccgctaagattaaaagtaccgagtttggcagctgcggcacgtatcgcactcacttcggcatgagcagtggggtcacaagatgccgtaacacgatttactcctgttgcaactatttccccctctttcgtggcaatcacagcaccgaaaggacctccaccattttcaacattttctttggagagctcgattgctttccgcattaagtcttctctagtcatggcacaaaaaatatattgttagtttcattttccctttgcttctttttacaaagatagaaaaaactaacaatatacaatggaatattcctattaattttttaacagtatcagtaaacttcgcaagaaaatgatacttttttttgctttttttcgggttatagtttacctaatatcttgtccattacccagttagtgagcgttgcactttctccgtcgcaggagcaaacggacttacctaacaagtgatcgaccactgcctgaataagaggttgttgcacatgttccgggttaccgatacagatttcttcccgtcctttttcggtatgtaagccgataggctcataagtaaagacagagaaacaaatcattcccttgtcaccgataatttcaatacggtcttcgcgggcagagtcatgggctacgaaacaccaggaaccgctaccaaccaatccgctatcaaattggaaacaggcgcttaatgtatcttcagcaggataaagtccaccccgattgctcttataaccgcttgcttcgaggatacaaccgaacatatcctgcaacaaatcaatttgatgcggagcaaggtcgtagaagtagccacctccggcaatgtcagcctgcacacgccagggaaggttgtcacgattgtaatccagatcgcgtggcggctgggcaaaacgaatttgcacattgataatattaccgatagtaccgttctctaccagttcctttactttctggaaataggggagataacggcgatagtaagcaacgaaacagggaactcccgtttcattggatatgcggttgatgcgcgtgcattcttcgtacgtcacagccattggtttctcaatataggcaggtttgcctgctttcatggacataatggcatacgtagcatgtgaggaaggaggagtggcaatgtagatggcatttacttccggatcatcgatcagttcttgtgcatcgtcataccattttttgattcctctctctttggcatacgctttcgctttcgcaccgtcacgactcatcacggctacgacttccgaatgttctactttctggaaagcgggaccgcttttggtcttggttacttctccacaaccaatgaagccccatttgataatcttttcactcataatatatacctattgtgtctgcttaaacaaaccccaaagataaagctattttttgtcaagagcaactttattgattattaacttagcagagacagtggtaaaacagacattacgttttatttcaatagaggctctgttttacctgaacagaggctctgtttctggcaaacagaacgtccgttgggggcggatatatactccatttcggtaagaagtaaggtgaacactgctgatcctccggctgaagaaccgtaaccaccaggctaagcgaaaagaaaagccggggcggggagaggtttttcccggatggataaaaagaaaggagagaatcgcgattccctcctttgcgtgtagtttaattgaaactactttatcattaactctgtaaagatacgacattcgaaagcgaaagtcaagtctttgggagtttatttctggaaatagacatgaatatatccatcttacattctgtttttgattgttttcttctgacctgtaaagtgatgaggttattctttgtcatagtattttttataaatcttctggtattctttctctttttggaatttatccagccatgtattcaaactatcgagtaaaacgggtgattgtttgctgactgcccatgagtagaactgcgtgaagctgatggctgtattaatatctatttgcggcaacgaatctgctgccgccagtgcgatactttcgtcgcaaacggcatagtcgatgtctccatgcgctaccattgatatcaattgttcggaaccgtatttatcaatctccttgatgtagatagtatctccgatctcattgcctagattctgaatacgcaaaatagagggggagccttttacgacatgaagtgttcgctgggctaaatccagttgggtgcggatatagagtgaatcattctctccaatttctttgcgttgcaccagcacttgcttgttgaggaaaatgggagaggtgagaagcagagagtcttttaacttgctggtggctaatatgccataagcaatcacgtcataacgtccctcgcttaatccttccaaccgctcttcgaaactcataataggtgttatttcggttttgagtcctttgtcccgggcgaatgcctgtatcagttcgtaatgaaaaccggaaacggtgtcactgtctacataaaaactgatggaattatattcggtagctacacgtatgataccctccttggcaatggcagcataatcacgcggatgtcccgcaggtttttcttgcttaccgcattgacggaaagagaagataaatgccaatacaataatcactggcactaaatatctgaacagtctcaatttggggcgtgataccataagtcgtatagtttttgttaatcatagaaattccatgaaagaccgaatttcagcacacgtgggttgatggggtagtgaggagacagaaagtaattcggactgctcatgccctggttcacgtgatacatcattacatagaaacgtgtacgctttaaatgtaagtttgcatatacattcacaatcggataacctcctatctgtacctgatcgtctgtcggttgcaggtggaaattctgaatggccggcatataggcaggtgcattgtatttgctgaaataacgcacgtcggctcccaattgcacactaagtactttcttcgccagtttgaactgcatatagaagttatgatatagcgagagatcaggtaaaggaagtacagtctggtcactggatttctgccaggtcacctcattgtccagatggaagattcctagcttgaagtcctgattaaggctagcagataatacctgtatacttccgctgttctgttccggttttgcttcctggttgaagtaagtatagttcttgatattttcaactcctgctttcaggcgtgtcctccaacgtgcaatgctcaattccccttcaatacgggtacggaattccttgtccatatcgtcgtcccacatgaaatgcttggaatgataatggcgcatatagaaaggagcaagtttattgctgacttcaccacgggctataagactgacggtgtctttccacaacgggaagttcaggtcaatatctccttttacattgaattgtccgattgcttttcctgccaatcccacttcaccgatagcgtggtaatgaagcacattcccttcacgtttggataattcgcctccaacaaatatttcattttcgttgtatttatcaggcaacggatttccttccatattcatcagtgtatacttgctgattttataggaagcaaatgcagtcaatccggctttggcatatttattgaatccctcaagtaacgcaatacctatggtgtttttgattccgacgtaggtggtactgtctctgacattaggattatccgtatcaaagtaagtattctgataataatttttttcacgcatgtcgtcattagaattaaagctatgccgtgcccgttccacttggatggtgtgtataaaactggtaacggggacaaactcctgtttgacgggagtggtgtcattttcagcctgtggtatgtcacgactgaatccgagattatatcgttgggtcaggaagacataaaagtcatggttgcggttggtcgttgcacttagtacggtaggaatattggttgattcatattctctttgaccttgcgccatttcttccggtgcagtgatatagcggtcgtcctcaatacctccgttttcatttgttttcaggtaattattgctgtatatagcctgcatctgatatttgtcgccgatatagctaccgaaaactgctgcattaaagtacgccgtattctgattattgtaatatcctcgtccgtataggtagtctacattaaatccgaaagccagtttcttgtttacattgacagagaagtaagatttgaaacgctcttccccattcactttattaccggctttgtgatacgtcagattcgtataaggtacgttactgttagtgaaattaaattccgtaggacgaatgaagaaactggagaaaggctccatgaaaatagtcggctctgggtcacggcggtcaaagaagatgcgtgacatacggggagaacccatattggccagataattataatgtccggtaagtccttcagtcaggtttgaattctggaaatgatgaaaggctgtatctgccgggatgatagtccggtcgcccaactggttcttgatacgccacatatacaactttggaggcaatccctgtacttcgacatttgcactatccaatctgtccggaatcatggcagggtctacctgatttccgtattggtcgtatccgttttcgtctactctctggcgaccattatcgaactgtgcgtgaacagtcgtcaaacctataacggaaagtaatatatataatagtaagattcgtctcataattggaggcaaagatacttactttaattgagaattgagaattgagaattgaaaaatatgttgcatcctttacttggcgagcaattatttcttaattctcaattctcaatttttaatttattaaacctcacggattaactccatccctttcttgatagcttcctcgttcataggaatcaagtgatggtggcgttccggcagggttttcttcaatcctttgataacattctccaacgttacgatggggcgaagcttcaataatccgccaagtacgatcatgttgaatgctttggcattgttcatctcgttggctgcatccattgcgtcgatacgatataccttaatatccttacgggtaggagggttgataattccgtaaccgtcataaatcaggataccgccgggtttcactttgctttcaaacttttcgagtgaaggctgattcagaatgatggcagcgtcgtatttactaagaatcggtgaggatattttgtcatcgcttacaataactgtaacgttggctgttccacctcgttgttcgggaccgtatgccggcatccaggtcacttctttgccttccatcaaaccggaatatgccagaatcttacccatagacaatacgccttgtccaccgaatcctgctataattatttcttctttcattgttctgttgacttttagcgttattctttatcttttaaatcacccagcggatagaatgggaacatgtgttcttccatccatttgttcgccttctccggagtcatcttccagcctgaactacaagtggaaacgatttctaccaggttggaacctttaccgttcatggagttctcaaaagccttgcggattgccttcttagccttgcggatagccggtacggattgtacggactgacgggttacgtaagcagttccttccagttgggctgcgatttcagtaatcttcaatgggtaaccgtgaagttcaacgtcacgtccgtaaggacaagtcgaactcttcatgcctactagtgtagtcggagccatctggccgcctgtcataccgtagatcgcattattgataaagataatcgtgatgttctcaccacggttcaaagcgtggattgtttcggctgtaccgatacaagccaagtcaccgtcaccctgataagtgaaaacaaggcggtccggccacaggcgtttcacagcagttgccacagcaggagcacgtccgtgtgctgcttcctgccagtcaatatcgagatagttgtaggcaaacactgcacatcccaccggagagattcctacagttttatcttccatacccatttcctcaatgacttcggcaatgagtttgtgtaccacaccgtgactgcaacccgggcagtagtgcatggcgttatcgttcatcagagtcggttttttgtaaaccagattctcgggtttgattatttcttctttagtcataacttcatctccttatctgttggtgaaccgtataaaaaactccatcagcttgacaaagattgccgcgccgcatacgtagataaacattttgaaatcatcttttgctacaaagtaggtgatgatggctgcaacagccaatatcataaataggatgttcagtacgtttcttattttatcgggattcattgtttcgttatttgattattttttctttcaaggcagttacaatttcatccggatcgggaacgatgccacctagacgtccgaaatgttctacctttactttaccgttaacagcgagacggacatcttcaatcatctgtccggcatttagttccgtaacgagcataccttttactttatcagcgtatgcagcaattgctttggttgggaacggccacagtgtaatcgggcgaaggatacctactttaattcctttttcacgagctagttccattgctttctggccaatacgtgccattgaaccgaaagcgataatcaaatactctgcatcttcgcagttgatctcttcgaagcgtacttcattttcttcaatttcacgatatttagcttgaaaacggaggttgttgatttccattgcttccggtttcaattcaagggaagtgataatattcggtttgcggtcttttgcttttccggtagcagcccatggacattgttcaattacttctgcttccgtgcggcgtggcttttgtgcaggaagaacaaccttttccatcatctgaccgatcacaccgtcggcaaggataatagccggattacggtatttgaaggccagttcgaatcctaatgctacgaaatccgccatttcttgtacggatgccggagcgagggcaatcagtttgtagtctccatgaccaccaccttttactgtctggaagtagtcagcctggctgggttggatagttcccaatccgggaccgccacgcattacattcacaatcagacaaggaagttcggcaccggccaaataagagattccctcttgtttcaagctcacgcccggacttgaagaggaggtcattaccttctttccgctacctgcacctccatataccatattgatagctgccacttcactttccgcctggagtactaccatgccggttgtttcccacggtttcagttcggcaagcgtttccaacacttccgattggggagtaataggataaccgaagtaaccgtcggcaccgcaacggatagctgcgtgggcgatggcttcgtttcctttcattaatacaacttcttctgccatattcttttcttttattctacttttactttatacactgaaatacatccgtccggacaaaccgttgcacacgagctgcatccgttacaggtatcttccttcacttgccaggcatagttatagcctttcatgtttacctctttattgagggcgattacatcgagcggacacgccactacacacaggttgcatcctttgcaacgctccgtgtcgactacgattgctcctttgatttttgccataatctttattttattacgttatctttgagtacggttattgattatacatctcttttattgattgaacatatccttgtggtagaagttgaggatatctattgccatcttcctggcctgaacggcaggactgtccggattgatctcgatggcatactggtagttgtccagtgcctgcttccaatctcctttctttcggtaggcatttccccgtaaatagtaaagagtatctttctctttttcgacagaactgtcctggagaagctggtccaattgcttaatcgctgtgtccacatccccctgattgataagctcttttaggttgtctatttgctccatttcttttcgtctttcgggattctgaaacgcaaagatagtttttatttatgtaaacagggcaaatgaggacggaaatttgcaacgttttgagtttattgcatattgtatagtagaggcggagtttgttccgtccttataaggtacgttatccagcaggtggctgataccccatgccacatgtatcttttctgcgttttggaagtggggacagtcaatgccggtggccggaatacacattgggtttatgatgctgatgtaggacgtgtcagcggtagtgagaagtgcagccacccgacgcaggcagttacaagctttcggacattgctcgttgtagcagcgagcgtagttgaaagggactgtttgaaaaagaaaaaacgtgaaaggtaagcgtctccgcgattctatcttgtcgcccttttttcattcttatatttttgctatgtataaaaatgaagcattatggatttagcagaaaatcgatttggaaaaacttggaaacatttccttgaagtattgaaagtagactacaattgttctttagccgatgtttgccgcgatcagcataccacttttggtggtatgagttcctggatgtccagacggggctatagcgttaaacaagccaaggcagatgtggtccgtgattattatggcggcgttgaaccctcccaaccgacaacttcctctccttcattcactcaaatagcacccgccatgttgtcggaagaagagtttagtcttgccgggatcacaatcacctttaacagtggaaccaccatttcagtcaaacgggccacacccggtggtgtgattaaaatgttgcgcgattacgaaagaaaggagggagatccatgtattctctaacatcagccaatcgatactatctgtaccagggctttgttcgtatgaaccttggcattgacggtttattcaaaattatacgatcggaaatgaaggacttgtctcccgtttccggagatatctttttattctttggtaaaaaccgacaaagtgtaaaaatactgcgttgggatggcgatggctttcttctgtactacaagcgcctcgaaggtggaagttttgagttaccgacatttaaccccaatacaggcaattacgagatttcttatcaggttttgtcttttatcttaaatggagtgtcattaaagtctgtacggttgagaaaacgttttaggatctaattcaacattctgattattagacatttgcaataaagatatcatccggtttatttggctaattcgttgattttttatatctttatgccatgaaaaaggatgagatcatagagttattgaaggaacaaatcaagggattacgagatgacaacaacagactcttggaccaaatagatgctttgataaaggaggtttcttcccttaaagaggcactccttcaaaaaggcgaatctcttagcaagcaacagcgccttactaagggactcgccaaacttgtatccaacacatccgaacggcaacaggctccccaatctgccatatccgaagaagagcggcagaagatagaagcggaaaaagcagataagcgtaaagcaagaaagaacaatggggccaaacgtgacatgcattatgagatggaggaagaagaacatgtcgtttatcccgatgatcccgattttgacatcaataaggcccggttgtttaccactgttcccagaatatgcgtccgctatgaatgtgtacccatgcgcttcatcaagcatgtctacaagatacacacctatacacaagaaggtcgcctgtttgagggaaaaacaccggcttcggccttcttgaattccagctatgacggttcatttattgccggattgatggaattacgttatatacaatcgctacctgttgaaagaatcatcaactacttcgagagtcatggctttacgctgaagaaacctacggctcataagttgatagagaaagcctcaaacctcttcgaaaatctttataagtgcatccggcagacagctttgagtgatccttataaggcagccgatgaaacctattacaaaatactcgtcccggaaaagaacagcaagggaaaaggagtcaggaagggatacctttgggtggttgtcggcataaacaccaggatgatatacttgctctatgatgacggctcccggtctgaaagagttattcttaacgaattaggcagttgcaaaggtatcatacaaagcgatggttactcaccttaccggaagctcgaaagcgatgcttatcccaatatcacacgcatcccgtgcttgcaacatataaaacggaaatttatagattgcggtgagaaggacccggatgcaaaaaggatcgtggagctgataaacgcactttatcaaaacgagcataagcataaagttggggttgagggatggacggtagaacagaatcttatgcatcgaaaaaaatatgcgccggacatactcggagaaataaaagatgtgtttgatgaaatagaagaacggggggatttattacctaagagcgaactgcaggaagccattacctatcttcgcaatgagtggaatgcagtggtggacatctttaattatggtgacacttatctggacaacaatatggttgaacggatgaaccggtacatatccttatcaagaaaaaactcattgttcttcggcagccataagggggccgaacgaggcgccatactctatacgatagcactcacttgtaggatgcataaagtgaatctatttgagtatctcacggatgtgataaacagaacagccgaatggcaaccgaacacaccaattgaaaaatacagggaactgcttcctgacagatgggaaaaggctaatgactaaaaagggatcattagcctttttattttaatacactatatagaatcgcggagacgcttaccgtgaaaggatgggtgaagggaacacccttcacctataaactgcttatagataggataatacaaggaaaagtgaagggtgaagaaattgttcattataactcttcgcatacccgcatttccatacctttatataccactacaatcttgtgtagttgcgtggagccgatagcttgtttcaccgtgtccgtgtcggcatagcggttggcttgggcgatggcttcttgacgcaattcctccacacggttttcagaatcgcgatatttggcgtattttaactcaacgatgtagctgtgcttcatgtcagaatatatatccaacatgggacagaggaaaatatcgacgtaacccgcttgtgtatcttgctcggagataggacggtagaagcggttttgcgcagtcatggccaaggtgaagccgtgaacgaagaattcgcccttttgcttgtcacgttgggatgcataacgtttcaggcagtcggcaatgtagccgaaataggcttgccagtcgcctcgataagccagctggcttgaaagttcgcttttctcatagctgctgaaactcaagtctgcgtcgttgtatgtattaagtaaataagtgtatagttgctcctgaaccaccaggttgggaatggtcagcttggtttttccttcatgcattccgctaatggtcaacattccgaaatagtagagcaggcttataaaattgtccggactggtgatgttgacggcagggaaacctttcttcagttcaccagtgatataaccttgactcactaaagtttgaatgacggaagcatcgtgtgcaaactccttatcctttcgaatgagcatacgcagcttttcatagtcgatacgtatattatcttctatcatttctcgtggtgctttgccgttatctatgtaattcttcacgaagtagagcaccatgttggagttgtacatggtagtttcaccgtaacaatcctgcgcgaagcaataattgtcgtaccacggtttcattatttccatcagttcgtcaacagtatggcggaaagggctgttggttgaatagtaagtcagcatttcgcgcacttcttcttcggtgaatcccatcatttggttaaattggggggtaagtgagtagttcgtgccgatgttgaagccactcgtcaggtcatccatcgttacggggcttacgccagtgatgaaacaacgctctatgctggaataagttcctgccttcaccttattgaagaaagcacgtagataaccttcgccatgcgtttcgtcagtgtaacggtgcaagctttccgcatcggaaaggatggcgttggtgaagtggtcgtattcgtcgatgaagagatacattttctgtccggcacgttcgcactccgaaaccaaatagtccagttggttgacagccccgtccttttcgtccaatcgttctctgataccttgtggcaggaggtcggaatagacttcacagaagaagtcgaagcggatttggcaatgtgcatccagtccttttcgataatcgttcagttcgccggtgatacctgaaaagttaaggtaaagcaccagatagctgttgcggtttactgtgggatgcttcccgatgtagaggtcgccgaataagtcgttgaacttatcgcgggtacgcacatcgtagtagtgttgcagtacgttcagcgtgaggcttttgccgaagcggcggggacggatgaagaaaaagaaccggtctgcctgctctatcataggaatgaagcgggttttgtctacataataatagtcttcgcggcggatgactgcgaagttcatcataccgtaaggtaaacgctttctgttgggtactatatattccattggatccatcttctgtcctcctgctgatttcttttttataacttgcttattaatagcgttaacgacacaaagatagtaaaagttcttgttgggtacgaggcatcctcaaaaaagtattggaaaaactcattcacacaaagaactgcagccctgacaaagctattctgaaacagcagtgaagtggcggaaataattctcgaggttagcttgtatatattgaaagatactgtatttttgtgcagaactaaaaaaagaagagactatgttggacattattttgatcgtaattagtgccctttgtatgatagccgggttagcaggttgtattctgccgtttcttcccggtccgcctattgcttatgtggggttggtcattctgcacttcacggataaggtacaatattctacgacacaattaatcgtatggttattgattgtagctgttttgcaggtattagattatttcactccgatgctgggaagtaaatatagtggcggtagtaaatggggtaattggggatgtatcataggaactcttgtcggtcttcttttcttgccttggggcattattctcggtccgtttctaggggcggtgattggtgaactattaggaaataaagagttctcgcaggcactcaaatcaggtgtgggctctttactcggatttatattcggaactttactgaagttcgttgtctgcggttatttttgctatcaatttatcataggtcttattcggtaacctatttgatgttgtaaaacattcgtaagaataacttatctattgcctttacatagagtactaaatcgatgtgtgttcgtctttattgaagtagcacattgaggtagtaccatgaaaaagacttttatttatctttcttttatcattttcttggggtggtttccctcgctttttgcgggagaaatttatgtatccctgcaggggaatgataagaatcccgggacaaaggaagctccgttttatacattaaaccgggcaatcaagcaggctcgtgaatggcgtagactgaatcggccggaagtagccggaggaatttatattcgtttggaagagggtgtttatgcccagcgcaattctctgtttcttcgtccggaagatagtgggacacccgattctccaacggtgatttgtgcagtagatggtgctcaccctgtaattagtggtggagttgctgttacggggtggaagcgtggatgtaatcatccggcaattcctgaaaagctaaagcagaagatatggtcggcagaggctcccctaataggaaatagaagagtagaaactcggcaaatgtgggtgaacggtcataaagttcaaagagctgcgcaatttcctgacggagaattggaacgaatgattgacttcaatccggaagagcagacaataacgatccccgtttctcaaagtgtaaatccgaatagactacaaaatgccggtcaactggaaatgattgtccatcaacgctgggcgattgctattttgcgcgtgaaaagtatagacgtgaaagacggacaagctgtagttcgcttccatgaacccgaaagttacttggagtttgcgcatccctggccgcaacccgtcatcggaggagagaaaggaaattcttccttttgcctgaccaatgcactggaattgctggaccaacccggtgaatggttccaggaatatccttccggcacgatttactattatccgcaggcgagcgaaaatatggaaacagctgaagtgattatccctgccttggaaactttagtgaccatagacggtacattgtcccgtccggtaaaacatatacaatttaacggaattacttttgcgcatacctcttggatgcgtccttcttttcaggggcacgtcaccttgcaagggggatttcctttattggatgcctataaactacaagaaccggggcttccggaaaaagcggaactggagaaccaagcctggatcatccgtcccgaaacagcgatacgtgtaagaggtgccgaacatattgatttcaagcattgcacgtttcgtcatttatcatccaccggactggattatgaatgggcagtcacagcatcgagcgtcgaagattgtcaatttacggatattggaggaacggctttactagtcggtgcatttccggacggaggatttgagacgcacatcccttttattcctgctgacgtacgggaattatgttcccatattactatcagaaacaatttcataagtaatgtgactaatgaggactggggatgtgtaggtatcggcgccggatatgtcagaaacatggatgtttctcataatgaagtctgccatctgaactattcagggatttgtgtaggctggggatggacatcgctggagagcggaatgtgtaacaaccggatagaagcaaactatgtacatcactttgcccgtcggctatacgatgcaggcggtctgtatactctttccaaccagccgggttccgtcatgcgtaataaccggatcgaacatttaatcgaggcaccctacgctacgaatgaccgggctttttatatctatctggatgaagctacggacggatatacaatggaaaacaactggtgtcccactgaacgttttgattcgaaccgccccgggaaaaagaacgtgtggaagaataacgggcctcaagtggcggacagtattaaatacaaagctggaagaataaagcaagattgaaacaaatcaatggattaacatagtcatcaatgtactagtatagcaatcaataaactagtgtaataatcattagaactagactagtatggtaatcattcaaactaatctgataattatagtaatcaataaacgatatttaatcaataaaatagatgaaaccaacgaactatcacttatttgatttccttgatttcgataccgagttatcaaggaatgagtcgctttggaaagcatacaagccaacggctgtttatgaaaaggaaggagatatttacgtaacagttccctttcagaagcaaaagctggctaacgatatgatggcggataccgatgttccccaggaggaatatatgttaatcatccgtcagtataacatcggtatcacccgcctgtttcttggcttcggcgattatgtgctgacagatgagtcggaaatgctacaattcagtgaccggattcagaaagtgcccctgtttataaaagaacaaaaaggaaaatggattctttcgacggaggacggaacgaagcgtgccgttatcaatgtggaagagcctctattagaccgatggagcgaattgctttccgaccctcaagaaacgcttgatatcactttataccctgatggaaagcgtgaaatccgcttgtcagcctacgaccatttttcgcctccccgctacgatgcgttacctgttgctttttgcaaacgcgacggtcggaaagaacgtgcaacgctttcttttgaatgtaagcccgatgaatgttttgccggaaccggagaacgtttctttaaaatggacttaagcggacatactttcttcctcaaaatcaacagtatctctgtatgagcaacttgcgtacacgtgttgcaattatatcgcaaatccgaaaataagcatccataagcaaccacagctcttgactgcaaaaatataaaattttccaataaatatcgtgatataaacgcataataatcaaaagtatggcacgaatttaacagaatctccacttttatccttacctttgtacatgatattggggaactataccctaacaattataaggaaacgatgcaaattcaaaacaatacattgatagcggaatgctcagcttacgatttcaaggaaatgttggaacgtaagaaagtgaagtcatggctcaaatccgtgtcggcttttgccaatacagaaggtggcagtctgttctatggagtgaacgatgatggagtgattgtaggtttggagaatccacaatccgatgctgattttatcagtgaaatgatgaaggcacgacttgaccctgtgccggaagttcagcttattccgatagaacacgaagggcataccctgcttgaagtgaaagtaaaggcaggaacgcttacaccttattactattatcaggatgggacacgtaccgcatatgtacgagttggcaatgaaagtgtagaatgcaactcccaacaattactttcgttggtattaaaaggcacgcacatgacatgggattctcttcctacccaagtggatgccggcaaacattctttcatcatccttgccaatactttccgtgagcaaacccatcaagaatggaacgacaagtatctggaatcattcggactagtaactcctgacggcaaactgaccaatgcaggattgctgtttgtggataattgcacggtatttcaatcgcgtattttctgcacccgttggactggactctataaggatgatgccatcagttccgtagaacatcgggctaaccttgtgctgctcttaaaatatggtatggatttcatcaaaaactataccatgagcggctgggtgaagatgccaaactatcgccttaacctccccgactattccgaccgtgccatctttgaaggactggtaaaccaccttatccatagagattatactataatgggcggtgaagtacatatcgacatttatgatgaccgcgtagaactggtatcacctggtgctatgcttgacggtacacaaattcaagaccgtgacatatacaaagtgccgtccatgcgtcgtaatcctgtcattgcagatgtgttcacacagttggattatatggagaaacgtggttccggtttacgcaaaatgcgagagcttacagagaaattacctaatttcttgcaaggcaaagaaccgcaatatcaaacggaagcgacctctttctacaccacgttctataatttgaactggaacgaaagcggaagaatacctgtagaggaagtagccaacagggtaaatagtaccctcgaaaagtaccctgtaaacgaagaaagttcggtcgaaaagttcggtgtaaacacaaaagagttcggtgtaaatgaagaaagttcggtcgaaaagttcggtgtaaatgcggataagttcggagatacatcggaaacacagaagaaagtcagtaaaactgcacaaaagataatcgacctcgttatttcagatccttcaatcacagctgataatatggccaacaagattggtgtaactaaacgcgctatagagaaaaatatcaagagccttaggggtatgggaattttggttcacgaaggttcagacaaggctggttattggcgcattattgttaaaccataaacagaacaacaaacctatggagacctctttcataccactctttgcaatcatagccgttttgattatcgcctttttgtttgcctctttgccacaggtaaaccataaaacgcgataccgagtgctttatgcaatagccattatcatgctattagctgttatccctattagtgaatatatggctggtggcatacaaaactcaagtaacaattatctgcttgtcctaatattcgatattgcagtaggatatttctgtatgtacattgctgctttgctaaaattcaacgttcttaaacgaaagaaccaagcattagaaaacgccttgacagaaaagcaacaagaaaatgtagcaatcctattggagcatcaaaacgaaaaacaacaagcactccggcaaagagagcttgaatggttagctgggaaaataaagatgtttaccgaagaagaacaggaagctattcttgccagtgctctatcatttgctgaacatgacttgatagttgctccctcaataagcatacaacctaaagaaacatgtagtcagcaagaactaatgtactttgtctgctctgctttttacaatatggataaaagtcgtagtgaagttgtgggtttcttatataaagtttttcctctctattttccagcaggagaaagtgcattggctaaaaagatgccgggattggaaaaagtaaaagagaggagagagaaagaatgtaattagcgcatattttcaaaccatagaatagaattaaaatgaataatacacttatagataattccatagaagcactttcaatgacaacaacattgagaaaatgcttagccattgatggtattaaaacagttagtattgccacaggctattgggatattcccggtttagctatactacaagaaaatttgaggtctttcattgaaaaagaaggaacaacgcttcgtttacttataggaaaagacccttatatatacgtaaatcaattaaagtcacctaaatataaagatgcaaattatccgctggacttcataaaaactgatatccacgaacttaatgttactgaggaatataaagatgctatacgtctgcttcttgattattgtacggaaaacaatgattcaaagattcagattcgtgtatttcgaaaaaatgaaaatgacgaaactcaatttttacattctaagtgttacatctttgacggaaagtcaaacggcattggtattggtatcgtgggtagtacaaattttacacaaaaaggattacaaggtaacgctgaattaaactatattgaaacagctccaaatcaagtgttatcgcttgatgaaatacctggtaataaatctcatttgatatggtttaatgaaaaatgggaaatatctgaaccttggaacaaacaattcttagaacaaatccttaaatctgcacctataacagatgacgtggaaaaagaacgcaaaagtgaacaacaatcattcactccatacgaactatatatcaaattgctacaaattaagtttggtgacattgtagacaaatcactcggacaacagatagaaacttatctgccagcgaacatccacaaactggaatatcaaatagaagctgttaagaggtgtatcggcattatgcacgaacatggtggctttatgttggcagatgtggtgggacttggcaagacgattattggtacgctcatcatcaagcgtttcttgtccgtaccagaagacgatggacgagaacgtaaagtattggtcattactcctcctgccattcaatcgggttggaagaagactatagccatgttcgacaaaaattctgacgagaagattgcgccatacattgacttcattacaactggacgcatcggaaatgttgccgaagatgagagctgcgaagatgacgatgacgacagccgcgattctggcgattttggtggaacactccaagaaaagaattatggctttattgtcattgacgaaagccataagttccgcaacagtgccacattgatgtaccagtctcttgatgaactgatacagaagatttgttctaatacaggggtatatccatacgtgggtcttctttctgccacaccgcagaacaaccgaccaaacgacttgaagaatcagatttacctttttgagagaaaccacaatgacagtacattgaagaaggctgaaagtggtaatatcgaaaggttctttgcagatgtcaaccgagaatatgaattgctgatagatagaagcaacgacataccagcagatgagcgccgccaacgcttggatgccgtgtcaaagagactgcgtgattgcgtgttaagtgatattctagaacgccgaacaaggactgacgttgagaaatattacaaggatgatatggaatcacaaggcttgatatttccaaaaattgttggacctaacaatcttgaatacatcatggatgacgagttggctcaactgttctctgatactatgacaatcattgctccaacggaggcagaaaagttgcagactgacgagtggctaaaatatttccgctatcgtgccattgaatattttactgaccctgccaacgaaagaaaacatacaggtcgaggcaatcgtggtgtcaacgacgttgccaagcagcttgcaaccatcatgcagattcttcttgtgaagcgtcttgaaagttcgttcactgctttcacccaatccctgttgaacctgcgacgttacacagagaacatgattaagatgtgggagaacgacacaattttcgtttgtccgcaaattgacgtgaacaaagaacttgactatgaagccaaaacattgaaacgtggtaaacgtgtttcgtttaatgattgtgtagaagacatcagagccaagataacaaaattgacggaacaagggcgtaacgagaagggacagaatgcagaatataaccgcaaagacttcaaggaggaatactatatccaactgaaagaagacttccgactcatttctaatctctatgatcgatgggcgaaaaacccacaagacccgaaatttgatgctttcaaagagaacatcaagccagaattgtttaatccacaaaagaatacctctggaaaattggttatcttctcggaagctataaacacggtacaatcgcttgcgagagcggtaaaggcaaagggctataaggcacttgtcattactgctgccaatcgtgatgagatggaacatacgattgaggaaaatttcgatgccaattacgaaggtgtctggaaggatgactacaatgttatcattacaacagaggtcttggctgaaggtgtgaacctccaccgtgccaatgttattctgaactatgatactccttggaactccactcgcctgatgcagcgcataggtcgtgtaaaccgtatcggcagtaaagagccttttgtctatgtctataacttcatgccaagtgcagaaggcgatgcgcagattcagttggttcgcaaggcacataccaagttacaatccttccatgtcctgtttggtgaagacagtaagattttctcggaagaggaaagtgtggtacattacggtattgccaaagctgttgacggtgaagaatcacctttgcagaagtatgtatatgaactgaaacaatacaaggatactcaccctgaacgttatctgcaaatagaacaagctgataaagactggcagatagcacaggctgcaagtggaacggcatatttcatagtaaaagcaccacactctgcaaggcttgcaattagaatacgtacagaagccgagggtctgtataacgccaaaataatttctttgcttgaactgcttgaagatatgcgtgtgaaagaaaatgccaaacgtgttccattaccagataactggcgacagctttcggcagaagccataaagacttataaccaatactttgtccgcatcaacaagtcaagggctggtgacaaggctacggctgcaaaagaaatgttggtgaaaattaacaacacacctagtttatcactacaatccaagattttgctgaaaaatgctcgtaagtttattgaccgaggaagttttgatattatcaaaaaagtattggctattggtcaagaattagaagagcgggggttacgtctctttgccatagagcaacaagatatagacgagattctggagcgagaaatcggcaaactcgtagcccatgtggaaagtaaacaaggcgaagcatctattgtattaggaaccatcaagtaaacaaatacccccatgaataaggagtcattaaaagaatatttaagcagccgatatcaaggctggagttcgttcctcaacaatgttatttttcccattttcggtgaagatgactttgaggatggttttgaaacagagcttttggagagtcagcccgaacgaagacaactggcagaagcgacgggaatacgcagcatcaagcaagttggaatgatgtatgttggcgttgaacctttacagattttcgatgtgacagtcagcgaccgggttatgatggagcataaccgtgtgaacatccagcggctcatccgtgctgtcatggatcaattctcttgtgccttcatgctgttccattacgaggatgatactcgttgggattggcgtttcacctattgccgaaagagtggcaacaaagaagaatccaccgacagcaaacgctatacgttcctgctggggcctggtcagtcatgccgcacggcaactgacaacttcatagctctatacgacaaaaggaattctcttgaaattaaagacatcgaaaatgcattcaacgttgaagctctttctaaagagttctttgggaagtacaaggctcaatacgaagcttttgtcaattacatggttgaccctacaaacggaatgcgtcaacacttcattgatacaggctttgaccatacgggtatggctgctgacaaaattcgtgaccgtgaggaaaaacccattcgtgactatgtgaagaaacttcttggacgcattgtgttcctgcacttcctccaaaagaaaggctggcttggcgttcctgcaagcaaggaatggggcgaaggcgatcgtgatttcatgctgaatattttcaagaatgcaaatgaacgtcaaaaggaaaactttcttgatgacatattagaagacttgtttacagaaggtttagaccgtaaccgttcagatcagggcgacctttacgacacaaaagtagaaggcttccgcaactgtcgtattccatatttgaacggcggtctgtttgaacgtgacattcttgacaagaagcccagtcattttcctgccagctattttaatggcctgctgacaatgctctcgcagtacaactttaccatcgatgaaaatgacccaaacgatgcagaagtgggcgttgacccagaaatgcttggacgcatctttgaaaacctgctggaggacaacaaggataagggtgcattctatacgccgaaagagattgtgcagtacatgtgccgagaaagcttgatagcatatctgcaaacagacatgagggaagaagacaaggagtgtatacgtcagtttgtgacaactcacgatgcatcccagctgggcgaattaaaggaatacattgatcagaaactgtacgatgtgaagatatgcgaccctgcaattggctctggtgcttttccaatgggattgctgcgcgaactgttcttctgccgttctgctattgagccaaacattgtagagaatgcagctaacattaaacgtcacattatccaaaacaacatttatggtgttgacattgaacgtggagcagtggatatagcccgacttcgtttctggctctcactgattgttgacgaaaagtcaccagaggctctgcctaaccttgatttcaagattatgcaggggaattcccttctggagcaatataagggtgttgacctttcaacgatgacagaaaagaaaataggagctggtgaaagtctaactttctttgatagcatgttagatgtttatcgcaaaaatctacgcgacaaacttactgaatattacgcttgccctgaacatgacaagaaaatgcagctgagaaaggacattgcagatattgtaaagcaggaactcgttgagcaaggtattcatattgattttgaagatatggacttgtctgcaaacagtcagttcttcctctggcatacctggttccatgatgttttctcacgaccctcaaaagagggcttcgatattgtcattggcaatccaccgtacggtgctaaaatttcatctatagacaaagcatgcttcaaacatatatttacatctgctcaaactatacctaatatacaaaaaggatctttagatactttttcgcttttcattgatttaggttaccaaatattacacactaaaggaaatgcaatctttattgttccactaagtgttactgcttccgatgcaatgtcaggacttcatagactactaataaatcactgtgacgaaatctatgtcagttcatatggagacagaccacgccgtatatttgaaagtgcagaacaacaagtatccattattagttttaaaaaatccagcaacaaggccacaagaattatgactacgcatatcaacaaacgctattctgatgaatctctgtggttactcttagatgacctaaagtttgtaaatgcccttcatcatattcgcaatgggagaattccaaagataggcaatgaaatagaattaggaatattatgcaaattagagcgttgtgtcacaacaataaaagatgtgtataaacgagaaggtttacctatttattaccggaaggcaggtggtaggtactataaaataataactaagattcctactcattcttctgcagaaggggaattgaaagtcagagaaaaatatcaaagtcttgtaggagcagccttgtcaagtaaccttttctattggttttggctgatacactcagattggcataacctacgatcatccgaattagaaatgtttcctatcccattcgaatcattttcagatgaagaacttgataaaataaatactttatatgatacttatcttaatgatttatattcaaagagccagacaactaaaacgggactgaaatgtttttttgcaagacaatctaaaatgcatattgatgcaattgataaatttattggagaaaaatatggtttatctgagattgaaataaaatttttaatcaattatgactatcaatatcgaaatgctgaataagcattaattctgaaaggaaagattatgataattggagggattatcctccaattatcattcattctccagccaacctaaattctaattcgtaatttttgataaaatcggtttcctcctgcgtcaatccgtatagcggacagatgtagtcatctatctcatcaatgatggctttggagcgtacaattttgtattccttgaatgaatcaacattataggtggactctccagaagttattctgatattagcttttgcctctatgtcagaaagataacgagaatacaacttgtcaagatagtcaatatcctcagctgagagctgtggaactgtgaaattctctatctcgtatgtcttccaatttaaattatcagaaaagatctgatagaaccaaaatgacaaactgctactgagtatgcagccaacagcatctgcgattttggaattagcgaaatagatagttctctctgctgatgaaccggtactataatttgttacgactttgaaatatcgccctcctgcaaacctatatatgattggactccctgaagtcttgataagagatcctaactttgtatagttgaagagtttgtttaagatggttttctctatttcagaacctatctttggaatacgaccataaagtgtttgccctttcacatcaacaaattgcaaattatcaatgagcctttgtaattcaaactcattccctcttctgtgcatcttggttgagaaaagatactgacatggcgtttcagtcttcttaaaaagaagtatcgaagtgtttactacagcgttctcaaaaacaggcttaggacgtactgcatacgatgatatgtatatggtatcacagtttcccatcaaaagacggtgtacgcctgttagggaatcacttgatgtcaaggatattggaacgatataggcaaaactcccattcttcctaagcagattgtatcccaattctatgaatagtgtatatgtatcaagagaccccttctgtaatcctcggatgctatttgccgtcacataggtattcttataatacctctttgtttggttgtcgtatttcgctccgtacggtggattgccaatgacaatatcgaagcccttttttgagggtcgcttctgtagtacatagaaatcaatgatagataccatactcttcccatccttcttgttgacagtttataggcaaatgaagccccgtataaacgagataacgatataatgtagtttttgatactttcaatcttttagatataactgttttttctgttcctttagccaattcttttacaatataatcgtgcttgttggcacatttgggattaagtctacaacgaaagccacgacaatgtccgagcattgccccttctgctttttttctcgctaacgcctcttttgtacgttgactgataagattgcgttcaatctcagctgacaatccgaaagcaaaggcaaggactttactttgtatatcttccccaagtctatagttatctttaattgtccataccttacattcttttgtcatacagatattcaagatttccataatcataaaaagattgcgtccaagacgtgaaagctcactacagatgataatatcatctttgcgtactttacgcagtaaacgtccaagctgtcgttttgtgtaatttttcgttccactaatagtttcttcaatccaatcgccaattgtcaactcattattattacagaaattacttatctcaaaacgttggttttctacagtttgtttgtcactgcttactctaatgtatccgtaaatcataactcttaaaattatattaatatacaccaatataaaaaattccttcacaattgattaaaatgtaaagggataaattggagcaaacagtatatacgtagaagcatatactaattttccccttttattgctatctgcttttctatcaagttctgattctgttccttcactgccctatacatagaataatacgcaaagctctcttccttatacttcatactactaacagaaacagcaacggcccatatcataataacgacaatgaagaccatgacatatcgtagcttaatatgatagccatatataaacaacccactgatattaggtggaataacggttacagggcttttcaattcattgatttttgctaatatctcatcctgccgtttcaatatacatcgggtattagtttcgatagttatacgattctgattgtaatcgcaaacgtgccgataaagatattcaagaagtttggacttctgcttgaataaatcaatgagtttcggaaaccatagcgaaaacggcaatgtgttaggctgctgttgccagatatgtttcttgatcacagacaaggcttcattccagcaagtacagaaacttttggcaattccagtataaatggtcttttcatcaaattccacttttacagattgttccgatttagaaacagtgacattctgtttttcaatacactctttcagttcactgatactttggcgcaaatttgcaagatttgcagctattacatcttctttcattatcttctacgttttgaaggtttataaaaaggttcgcttctttggttatccttgtctttatcatcccgcccgccttgttcattgttggttcctccacctccaccgggagttatgacttgatggggttgaataatcagttccgcagctacatcacccaacatagtgcaaaggttgttgaagctcaaatcacggtcaagtttagaaccagcaatgctaaattcatccatacaaaaggatataccacgaattttatcagagttctcagcatgattaaaacgcatatctatgccctgacctttgagcgtactaataaagtcattccaagaacgagaatttacctgcgcatcaagaactgaagaacgaagattatacttccgtaattggtgaggacgcaaacgacttttatttctggctttactatttttaggggcaaagtaaaatccatactctttagtcaaagcacgacaaacttttgcattgcatattctttcattgctgtcagaaataagattgccttcattgtctatccgattgaataccaaatggcaatgaggatgtttcgtgtcgtgatgccgggctatgatatattgagtattacgaatccccatttgttccatccatttcttggcaatctccaccatcagcgcatctccttcttcattatcgggaaaacggctaatgtcttgcgaagaaaaagcaagtgatacgtgtttcaccggactttttactttcgggcgcatggatgcttgtatctgaaaaaaatcagcgatggctttattactaatggtgcagactccttcgtgtgccaaaagtgtggcactctttttcttgttcttttggtcattggcgtaattcactattcctccaaaatcggttcttgttttaatctttgctatcatggcagttgttcttcacttgggtgatgattctattgacttctgatatgattgagaagcattgttgcttgacagcttccaaaccataagtgtgcatctggtgggcaatctgattgacattattggcgataccggaaaggtcacgaatagccgataccatttcaggactgatgcgttgacagacttgacaatccattgcagcctgatggcaaaattcattgacagacaatccagcctgctccgctttggattggatataaatgtagtcgttctcggtaaacattacccgaaaacatttcgtgcgtttctgataactcgccaacttagggcgaccaccaagtttcttatccttcatacttatctaaacttttatgttcataaattgattttttgagagtggctgttctatccgcttgccgcataggttttagtgacactaaaacacaaacttgccactcaaaaaatcttcctatatttcccttgttctattcggcttagtttgccatctttgataaaggcttctatccacttgtttgccgtacttccattctcgcccaaagttaaaaccgccgcatcataatctttctttgtgaaagtgtcaggcaacatattataaagggtgttccttcgtgcataaacgcctgtctcttgcgaaacggtattgaatcgtttagactgatttcctgacaaattctgataaatgaatacggcatgataaagcagggtgtcgcaaatactcatggctacggaatagtcaaactcatggcaaaccaattgtacagtctcgtcagaagaagatttgtgaatcacattatccaaatgtcggacaacggtcaacaccatcattatacgataagcaatcagtcccatccgtctgactactccttgcatcttgttatccacttcgtcacaacattcctcattcacccgactgagatattcaataaagtgttcctgtaaatcagagggaagagaaaaggaataattaccctgccgtacaaaattctcatgtaaatggcagaatttatctcccaacagtttgaacatggcattcttggattgggaaatgtcgcttgtggcaaacacatttcttatacctcgtttgaagcggataatatagaaacaaaagcgactcatcaatccgttctctgcatcaggtatcaatcttcttacctgttctggagttccagccaaagctaccgatactctcggattggctacttcacaatactctctatccttacgcctactcaaacttaccaattcatgatggaatgcctttcgcaacacatcggagtaattgccgtagtccgatttcaaagtctgacttaacgtgtcgccctccgattcaaacagcagcccgattccgtcattatctcctaatatcttcaagaaagagcttgcgctactattggctggaatcacgagcatacgcatgggcggttcagttggcatagccattccatcggttttcttacctttaatatatgtgttcattgcttctttatattcctgttccaatcgtttggaaagttcatgcaaatggcggttgatgggggctaccaattcacggcatagagtcaatgctccttttcccataccggcatccgctacaacaaacagatagaggttgggataaacaatgcgttcatcgtacacgccacaaacattatgaaagcataccgacaaacacacaatagccccgattaatatcgtatcacggtcatctaccgaaatggaattattgacaacctcatttagaaaaggaggaagatgctcaaacacacattcaggaaatgtaggaagttcttcttctgattttatccatttacccgttttaccattttggatatttggcaaaatggataaatgctctttgaagaacggagccaatgagattccagcttgatttgccaaatggaagaaagaacggatagtaatgccttgccctttggagtgcagacaatgcgtgtattgtttatccgtttcttccttttgataggtagggtaaaacctgctgatgcggtggtaatactcccgcccgttctctcccaatccatccacaagcgcaaagcccaactccacccaatctttataatgaggggctatatcaatggcacactgttctatctcccgaacaacactttccacatcatcctccaccttattatatataggggcaatacttggtgtatgtgcctgttgtatttcagaagggacattctcccaatcttgggcggaaaatattttcttcgacatcatctttgtatttagggttaatatatgcttgtgggtcgtagggtaagaagcatgaacgagccacatcactgccggacatatccaccaatggcaaacctgtcgctttgatacagttggtaacagccttgaagtaccgggaatgttcccagcctttcaaatcaacaggtattatccacttcaatccattaccggatggactgacaaataacagttctgtatcaaaatactcatggttaagtaattgttgctttaacctccctatgttatccacatgatcgaaatccaaacacatcaatcctgagtgcataatcagttccttttcattccgttttcggaataatcccgaaaaagtacaatagtcaaaatgggtggctttgtaccttttggcttcgggagaggactgcatctgccgcaggttctcggtttgtggttgggcataatgtccgatgacataacgatacacatccacaatacctatagccctcatcggttcgatgttttgaatgggcttgcgaaagaatgaaaagcaatagtcggtcgtttccatcatctgataatctttttagattcgacaaatcgtctggcttcttccattaagtcatcttgggtcttgtgcgatttgttcttcagccaatcgtcaatctctgattgcaggaaagccaaagccttgtttattttatgtacgggaatctgtttggttgacacccatccataaaccgtttgtttggcaggatgtgatggcagataagcgcaaagctcatctatatccatccacttgggtgagttacttgcctgtttatgctgcaaggcattcactttagattgcagtacttctacggactcaatcaggtaggacaacgcattcggcatttcctccaatgaatttactttataggccattttttcttcgtattaaaatttatgccacaaaagtatagggatgcttataggtgctaaataggtgcttgaccgccaccaatcaaccgctcatttaccactgacagatttaagtttcattaatacgaaaatttattgggcaacataataaaaggggaataaacgactgtttggactaacacattctttactgaacacctctatactacaaaatacccctcaaaaagttgatgcttcatgaggggtaaacggtggtaagtatatgattggtattacataagtcgttggtgctcaatggtggatataaccaccacaacctataaatccaaattttctatatgcagtgtattggcggctttctctttttgttcgtttacaatatgcgtataaatctgcgtggttttgacgttagtatgtcccatcaaagacttgatggtgtatatgtcaacgccattttccagcaacagcgaagcatagctatgccgcccacaatggaaggtgatgtgcttcttgataccggatgcttctatccagactttcaacgggcgagaaatccaagaggcatcagtcaatccttcaaaaacaagtgcttcatcatcgtctggacgtatgccgcatagttgaagtgcctgttgaatgactggcttgtaatcgggcctttttgtcttttgctgaattactactgcttgccatgtacctttgcttgtttgctgaatttgtttccatttcaaagtttgaatatcactatgccgcaatccagtgagaatagagaacaagaacgcacgtttcaaaacatcatccttgcaaggagtatcaaccaacatttgcacttcattcatggtaagcgcaacacgaggcttctctatgtttgttattccctttactttcgcgcttatatcaacggtcagatattcatcaatgaacgcctgtttcagtccggctttaagtatggaaaaataggttgatgccgtgttttgtgagatagtacctttcttattccctcccattggagcacggagaaggaacatctttatatcttcaagcagtttaacggaaatcgccttgaatggaattggttgcccttgtgaatacattttcaataattcacctacacgcctccagttgactataatcgaatcggaactattgggatgacgtgtgcttataatacgattgaaatacttgataaaatcctgttcgctccgctcattctgtgcagcgatttcgttttccttatcagtgtataggatggcactatcgtattcatgctgccgtaacttccgcacattgtcggcatagatgcaagcctcttggtctatcgttgaacggcattggataattccattcaaatcacgtttaggcttatagttgaatgttccatccggcaagattcgtgctatggatgacttatcccaaatgggtgtggatatagttctgttgatagattccaccacacggcttgcccgtttagaacctcgcttatacactgggtatgactctataatcagataccactcttctttataattcgaccttctgagtttgacggtcactttggtattgggtaatgctttcttcataacgacttatacaatttatcaatttcagatttgggaacataaacatagttaccgatttggcgtgtaggaatagaatgacggcgcatgtgcttaaacacactgctgtcattgatatggaacttctttgcgatctctccgatggtgtaacaatctttgggttcaaaggacaatgcctccttttttctctttctactccctgcctttgttttgaagtgttcatccatatactgccgactaaggcgtatcagacgctgaccaaaattgtatgacggtatcaagccttgccgtatcatacgataaagaacgtctttactaattccgtaaatcagcatagcttcctttacggttagataccccttactggatggtattcgtctaatcagtgcttggcgtatcgcttctttctcttttgcgatttgtcttttcttatacgccctcttggaacaagcagggcaacaatacttcgacactaatgtcggaggagtaaagattttaccgcactcctcgcaacttctttgaatgatgtaatttcctcttggcatattcttctcgttttaaatggtttatatcaatttaagttgtaccttatcgccaaataagacgtgtcgcaaacatgtcgcaaataagagataaaaaagcccatagaaaacacatagcaaccatgacccccataaacgcaaaaagcgtgcaactcattgagctgcacgcttttgcttattgtttattatctgtatccttatcggaatcatttgacttcctgaaaaaccaggacgggcaaggagtcaataatcggcgtacttataagaatatccccttctatctatccagccgcatgtatggaacattctaccatacatgtgctcatagcaagctctcgctgaccggacattccacccgttccgtccagtttctaagcgaccaggcattgttggatgtatttgtaataggcggtgatacgatggaagatattcttcgcggttatcgtgacctgaccggctatccgtctatgcctcctctttggagttttggcgtttggatgagccgtatgacttatttcagtgccgatgaagtagacgaaatatgcgaccgcatgcgtgccgaacactatccctgtgatgtaattcatctggatacgggctggttccgtaccgattggctctgcgaatggaaattcaatgaagaacggtttcccgatccgaaaggattcatcgggcggttgaaaaagaacggctatcgtgtctctttatggcaacttccatacgttgcggaaaatgcagagcagattgatgaagccagagccaatgattatatagccccattgaccaaacaacaagcgaccgatggttccaacttctccgccctggattatgccggaacaatcgactttacttacccgaaagcaaccgaatggtacaaaggactattgaaacaactcctggatatgggagtaacctgtatcaaaaccgatttcggtgaaaacattcacatggacgccctctataaaggcatgaagccggaattgttgaacaacctgtatgctctgctttatcaaaaggccgcttacgaaattacgaaagaagtgacaggtgacggcattgtctgggcacgttccgcatgggcgggatgccagcgttatcctttgcattggggaggcgattcatgtagctcttgggatggaatggcaggttctctgaaaggcggtctgcatttcggtctgtcgggatttgctttttggagccatgatgttcccggcttccatacattgcccaattttatgaactcggtagtagcagatgatgtgtacatgcgttggactcaattcggcgtattcacatcgcatatccgttatcacggaaccaataagcgtgaaccctggcactatccggccatagctccgttggtgaaaaagtggtggaaattgcgttattcgctcattccatacatcatagaacaaagtaaactagccatagaaagcggctatccgctcttgcaggcactcattctgcatcatccggaagataaactttgttggcatgtggatgatgaatactatttcggcaatgatttcctggtagctccggtgatgaacagcgagaaccgtcgggatatctatcttcccgaaggaaaatgggtgaacttctttacgggagaacgtctggaaggagcatgctggctgaaagacgtatacgttccattggaagaaatgcccgtatatgtgcgtgcaaatgccgtgatacccatctatccggaagacgtggactgtacggatgaaatggatttaagcaagagcatggctttacgcatagataatgattataaaggattttggactatgatagattgtggtagaaaattaattaatttagtatagtatgaaaacatggaagagtaatttagaagaaacaaaacaacgttatataaattggtggaaccataaaggaatcattctcaatatgtgggagcacttccaggaaggagtgcaaccacatgcagagataacgcctcccgcaccggcaaaagacctgtcacaaaagtggttcgaccctcaatggagagcggaatatctggattggtatgtggcgcacagcagtctgaaggccgatattcttccggttgcgaatacccaactgggtcccggttctctagccgccattttaggcggagtgtttgaaggcggggaagacaccatttggattcatcccaacccggatttcaccgatgaaatagtctttaaccccgaacacccgaactggattcttcataaagaactcctgaaagcctgcaaagcgaaagccaacggacactactttgtcggtatgcccgacctgatggaaggactggatgtcctggccgcactgaaaggaacggatagggtattactggacacagtgatgcagcccgaaatcttggaacaacagatgcagcaaatcaacgacatctacttcaaagtatttgatgaactatacgacatcatccgtgaaggcgacgagatggctttctgttatttctcgtcctgggctcccggaaagatgagtaaattgcaaagtgatatttcgaccatgattagtcaggatgattatcgccggtttgtgcaaccttttattcgtgaacaatgtcagaagattgattataccctttatcatctggatggagtgggagccatgcatcacctgcctgccttgcttgaaattgaagaattgaatgcgattcaatggactcccggagtgggcgaaccacaaggaggatctcccaaatggtacgatttgtataagaagattctggcaggcggaaagagcgtgatggcttgctgggtgacattagacgaactaaaacccctattggatcatatcggcgcggacggtgtacatttggaaatggatttccataacgaaaaggaagtggaacaggctatgcggattgttgaagaatatactggttcttctacctctgtaaataccaatgaacatcaacaggatgccgacttggcaactaccggacaggaacgtatttgtatacgggaagaacaacaccagcaagaggataaactgaaacctctgtatgaagccattgttgccgggaaactggaacctgcggttgaaatcacccggcaagccattgcggaaggaatagctccccaaatgattatcaataattatatgattaaagcaatgggcgaagtgggacaacgtttccaggatggaaaggcttttgttccccaactgttgatggcaggacgtgccatgaaaggggctttggaactactgaaacctttattggcaggaagtgcttccactacaatcggtaagattgtcatcggtacagtgaaaggagatctccatgatattggtaaaaacctggtggcttccatgctggaggggtgcggctttgaagtcataaatattggtattgatgtgacttgtgacaagtttgtggaagctgtgaaggaaaaccatgctgacatcttgtgcatgagcgcattgctgactactaccatgacgtatatgaaagaggttattcaggcattggaagaggccggtattcgtaatcaggtgaaagtgatgattggcggagcacccgtcagtcaggggtttgctgacgaaatcggtgcggacggatatagtgataatgcgaatacagccgtagcagttgccaaagaactgattggaaataaaaaatagaataaaaaggcacggattgcacggatcaacacggctcttaattacatagcctattaaaaccgtgaaatccatgtaatccttgcctaaagaaaattagatttaaacttatgttacttatttaatacttgaattatgcatgtgaaattcttagagacattagattggagtattctgattgcctacttccttattttgatagctattggtatatgggcaagttctaaacgaaaaaaagggagtagtcttttccttgcggagaattcgttgagatggtatcatatcggcttctctatgtgggggacaaatgtcggaccttccatgttgatagcttccgcaagtgccggatttactactggtattgtttcggggaattatgcctggtatgcatttgtctttatatgtctgcttgcttttgtctttgctccccgatatttgggtagtcgcattacgacattgcccgaatttatgggaaaacgtttcgggcaatctactcgtaacatccttgcctggtataccattattaccattcttatttcatggcttgcattgactttatttgccggtggagtcctgatccgtcaggtcttcgatattcctatgtggaaatcggcattgctgttacttgtcacctccgctttcttcacgatgctcggcggactgaaagctgtggcctacacgaatgtatatcaaatgatactgttgattgtagtatcagccacactggccatcatgggaatctataaagtgggtggtgtaggagcactggtggatgccgttccggcggattactggaatcttttccatccaaatgatgacccggcttttccctggctacctattatcctgggttatcctattatgggagtttggttttggtgtacggatcagtcgatggtgcaaccggttcttgctgccaagaatctcaaagaaggacagatgggaaccaactttaccggatggttgaaaatattagatgtacctctttacattcttcccggcattatctgcctcgctttattcccacaattggagaatcccgatgaggcttatatgacaatggtgactcatttgttcccgacaggaatggtcggcttggtattggctgtattgacagcagcattggtaagtactgtcggctctgcattgaatgcattaagtacggtattcacgatggatatctatgtgaagaaaatccgaccgcaggccaagcagaaagagattatcagagtgggacaagtggttacggtagtcggtgcactgatttctgtgataataaccatagcgatcgacagcatcaagggactgaatctatttaatgttttccagtctgtactgggatttatagctcctccgatggcagctgtatttctctttggcgtgttctggaaacgcaccactactctggcagctaatatggctctgacattgggaactgtgttcagtatcggagtgggaattttgtatttatgggtatttccggccgaacaatataatgcgtggcctcattttatgctgctttccttctacttattcgttatcatcggaataggcatgatagtagtcagcctgtgggataagtctccgcaattgggcatcttgaatatggaaaagatagaggacaaacctgcacgaattgttcttatcctatggggattacttattgtgactatgatcgggctttacatcttcttcaatggccactagtttttattcaccacagaggacgcagaggacacagagtcttttattattagataataatctctgtgtcctctgcgtcctctgtggtgaaactattttctgcgaaaacaattttcgtacgtacacagcccgcaagtatattccagcttacggacatgagaacccactccaataataccacttacagatttgatgggaatcatcagactggaatcagtcaactgaataccacaaggcgaagcaaccggaaataaggagaatagtttttgttgttccgatacgtgccatccgcaataaccggggctgtacctattagtgtgtttccaacctcttttttcgataaatacagccaactcctcttccatgcaatcagcagccttttctgcaatgatgctccccaatgaatctgctatatatattttcaccatgtcatcctcttgctggaggagatgttggaactcctcaaattcaactccggcagttgcggtaaaaaaggcaaaagcttccgaaccccgtaattggcgggtaatggttttaccgattgagagaaccgtatcttttactgtcaatgttgctttttcggtgtcgagcagtccatcggcgatgaaaaagaaaaaacggggacgaagaaggggagtggtacggtccagtaaagtatttatttcctctataaccattccatccggcatagaatctttatatcccatcgcctcgtaaatttcgagtgatgggatctgtagtttctgataagtgagttcctgttcaaacattattgaattcttccaatgcggcataaaatgcgtctatatttgctgaaggtgtgaggggtggaatatcacaaccacttgacaatacgaagttgggatatgcacgagtagcttctaatagttgcaaagtcgcttctttcatagtttccgggcctgccatcttgaaaagactcaccgggtccagatttcccattgccagtgcatcggtcggaacctctttcaacgcttcctccatcttaattttattcccgaagtggtaagcggctgcaccggtataaaccatcgcttgcgtgcaattccctgtgtttccgcaattatgaagtactacggcaaagtgatcatcctgtaccttctctactatttctttcacaaataaagaagaatattgcaggcaatcttcgttggataacaatcccgcagcaggttcagccatgattacaccgttcacaccggttgctttcaatgccatacaatagcgggtgatgaaatcactgcattttcttaacaacgtattggctgcatcgggattaatataaatcagcatcatgatttccgacatatcatacaaacgtccggccagcgaataaggaccgatgcaaccggcaaaaaccgggcggtctgtaatatttctggctgtcagcatatttgctttaagatattccgggattcttcctttattcaacgccggaacttccagcttttcaatagcagcttcatccgccagtaaacggccggacacactgggcacctcatttttcggaaagataatctctgccccgaaagcttccgcttctaccgtcagatccatgataacggttgctgccgcagccggatacttgtcacaaagagctttgatagcctcataatgaacctgtccgtttgttaccgcatcatgcaccgttttcccgataaattcgatacccggatgtgtcatgatcggaattgcaatcgtttccttacgttggatcgtttggcagatccattctttcatattcagtttacccataatttcagtttttaatatcgtcttgtaataaagacgaagttgctcttcttttgtaatctcgtatatgataaaatcttataccggtataaaaataaagctgtccttcaaaaagaagaacagctttacacctatttgatttatcttcgagctttattttaccggaatcttatcaatacggttctgatggcgtccgccgtcaaatttggtagagaagaactctgtcaaaatcatgtccgcttcttcagtgctgatgaagcgtcccggcataaccagtacattagcgtcattgtgctgacgagccaggtgtgcgatttctgcattccagcagagagcggcacgaaccccttggtgcttgttcagcgtcatattgattccgtttccactgccgcagatagcgataccgggataacattctcccgattccactgcaagagccagcggatgagcataatccggatagtctacgcttgcggtagagttagttccgaaatccttgtaagcccagccttttgcttccagccagccgcgaatatattctttcagttcaaaaccggcatggtcgcatgctaatccgattgttttcattagagcattgcttttacttggttatatacgttctcggcagtaaatccaagtttctcatccaacactgtgtaaggagcagagaaaccgaaagattccaatccccaaactttaccgtggcaacctaccagaccttgaagagtgacaggcagaccggcagtcataccgaaaatcttcgcatctgccggaagaatagcttcctgatattctttcggttggttgcggaacagaccttcagacggagcagatacaatgcgtaccttcacgccatctttgcgaagcaactctgtgccggctaccaatgtagctacttcagaacctgaagccaccaggataacatccggattttcgtcggaacctgctacgatataagcacccttggctgcctgttcgtaatctgttcctgtcggtaaattggcaatattctgacgagaaaagatcaatcctgtcggagtagacatattttccatagcaagtttccaagcgatggttgtctcttctgcatcagccggacgaagtaccaacatagagttgtgtcccttatgatttttcagtttttccatcaggcggatttgagcttcctgttctaccggttcgtgagtaggaccgtcttcacctacgcggaatgcgtcgtgtgtccagatgaatttcaccggttgttccatcaaagcagccatacgtacggcaggtttcatgtaatcggagaatacgaagaatgtaccgcaagcagcgatcacaccaccgtggagagacataccgatacagatacaagccattgacaattcagatacacctgcctggaagaatgctccgctgaaatcacctttcttgaaagaatgagtctttttcaggaaaccgtcagtcttgtcagagttagaaaggtcggccgaagcaacgatcatgttttctacctgtgtggcaagtgcgcccaatacggttgcagatgcagcacgagtagcgctacctgctttctgttcgatagcagcccagtcaactttcggagctttgcccgagaagaagagttccagttttgcagccagttccgggtttgctttcgcccatgcagcttttgcagcatatttttcagctacaattttcttcagctcttctgctctttttgcatacagttcggctacttccgggaatataacgaacgggttagtaggatcaccacccagattcttgattgtatttacataagcgtcgccgccgagaggagcaccgtgtgtagcgcagttagcttcatagctgctgccgtctgccttgcgtgcacctttacccattacggttttaccgataattagtgtcggacgttctttttcagcctgtgcttctttgattgccgcacggatttcgtcaggatcattaccgttgatattaagtacgttccatccccatgcctcatatttcatggcagtatcttcaacggttacgtctttcgtttctgtagaaagctgaatatcgttggaatcatagaacataatcaggttgtccaatcccagtgcaccggcaatacgtccggaaccttgagagatttcttcctgaataccaccgtcagagatgtaagcgtaaatggtctgattcatcacctcgtcgaaacgggctttcaagaatttggcagcgatagcagcacctactgcaaaagtgtgtccttgtcccagcggaccggaagtgttttcgatgccacgcatgatgtccacttcaggatgtcccggagtagggcttccccattgacggaattctttcagctcgtccagtgtgaattttcctgtcaatgccaacgtagaataaagcatcggagacatgtggcccgggtcgaggaagaagcggtcacgtccttcccaacggggattttcaggatcgtatactagaaactcagagaagagtacatttacaaaatcagcaccacccatggcgccacccgggtgaccggaattggctttctcaaccattgaagcagcaagaatacggatgttatccgctgcacgattcataagtttgttatcgttcatatcattaaaatttaattgatttctgtcagattgttcgcaaagataactctttatgtggatttaacaatccaaaagagctatcttttttatcgacaattttacggtcttcttgtttgtgatacaataagtaattactctaaaattactgtaactctaaagtaacaatggacttagcaggaagttttaccttcattgtacctttattgatttttacctctttgaaaggtgccggttttacaatattaggtttttcaaaagaattgtaatcggtcagtttttcagaggtcagaatctctccgacagctttttttgctttcgtatcacccagattgatggtgatttcctgcgcttcatcagcatctacattggaaagagaaatatggatcaccccatctttatttttggaagctgtggcgctcaccatcggtacagtgcggttatcacgtacacttatcttttcgcaagtcaggtcgataggaagataagtggcatcctggtgtactttatacatcttgaagacataataagtaggcgtcaacaccatttctttgtctttcgtcagaatcatcgattgaagtacgttgacaatctgtgcgatatttgccatcttcaagcggtcggtgtatttgtggaatacgtcaaggctcaaagaagctacgaaagcatcacgaagtgtgttctgctgatacagatgtcctttgatggttccgggttcctcatcccaccaggttccccattcgtccagtaagagagcgattttcttgtccttgtcatatttgtccatgatggtacaatgtttcttgagtacatcttccacttccagacatttgcccatcgtccagtaataatcatccttgttgaattgagtggctgatcctttgctgccactccatccggttacggtataatagtgtagagaaagaccgtccatccggtgtcctacacgattcatcaatacatctgtccatttgtaatcatagtcacttgcgccactggcaatcttgaacagacggttgccgtcataattgcggcaataagtagaataacgacgatataagtctgcgtaatattccggacgcatgctgccaccgcacccccagctttcatttcctacgccgagatatttcaatttccatgctttgtcgcgaccattcttacggcgaaggttagccataggcgagtctccgtcagaagtcatatattccacccatttggcaagctcttccactgtgccgctacctacatttccactcacgtatggttcgcaacccagcatttcgcaaagattcaaaaactcgtgcgttccgaaactgttatcttcaatggtaccgccccagttgttgttcaccatcttcggacggttctctttcggaccaatgccgtccatccagtggtattcatcggcaaagcatccgcccggccagcgaagaacgggaacggacaagtctttcagtgcattgaatacgtctgtgcgatatcccttgatattgggaatatccgagttttcgcctacccaaagaccgccgtagatacatgaacccaggtgttcggcaaactggccgtaaatttccttcggtatgatttctttgccttgatcggcatgtacggttatggtagcactcttttgtgcagaaagagatacggatgctgccagaaaagccgtgctgactaatagttttgctttcataaatggtatttgtttaatgattattttagtaaacgaacttcataaacggcagaggtccattccgtcccgtcagggataaaacgtatcggacaactacccgtattcagtttttgaggcagaacataagaaagagtaatgaaaccgtctttatctgcttcactgatagtcggatgaacagccaacttttcgttattcaaaagaatagccactttattgcggtcatctttccgtattgtaatcagtatgcggcttgcttcctctttcactttcagctgatagccgaaccaacctttggcacgtcggaaatgccggtctttattcgtccctgtttctgcctgctcatactggatgccatggtcagactccggctgctgttcgccggggaagatcaggtcaatggtttgattagctaattccgttgcttttcgttcagccgttgccatctcttcctgaatcgctttaaactgctcttcgcttgcctgccggaaataaacggcataacgggaattgtgcaggcggaagaacgggacgagttccaatgctttgccttgtgcaggataaacctctccgttatagctgaaagtaatccggctattctgttctttctgaagagatttgcagattgaatctggatttcctatcagcatcgggacttcttgcaaaggaatttgtttgccatgagcgatatgtccgccacggctgtcatcggcatataaaccatcaagatgttcagtgcctgtggaagctgcaagaacgatcggaccatataagaaagcataataatctttcttgtcgggaatttgttccacgctgactttcataggcaagtggaaagtaatgacatctccttttttccatttgcgggagagaggaagatactggttaccttttgccataacgaacatttttctttttccattgatgctgatgctatatcctttggattggttcgcccattccggaatacgtatcattaaagtacgttttttcttaggcgcttcatctattcgtaaagttaccttgccgtcatcggggaaacgggtttcctgtgtcaaaataatgccttgctctttccaggtcagttgtgaaggaatgaagagattgacataaagagtgtctttccgatacgcatagataaattcaccgtatttggtatgattctccaagcctgaacctacacagcaccacattgatgtttccggttgtgagtacacacgatagtgtcccggacgcatgggagtgaagtagacaaatccacctttatccggctcttgtgacgctagaatatgattgtaaagcgcacgttcgtaatagtttacgtagttgggatcaggttcgtttgtttgattcggattgtgagaattctgataaagcattttggtaagacggagcatgttgtaagtattacaggtctccggtccttgaacgtcgttcagcatggacgtgaagttatccgacggatggaaatgttcgcgtacactatttcctccgatgcagacagaacggtgattgactaccgtgttccagaaaaaacgggcggcatgatcccactctgcagcatgattccaattcttgtcgtcttgtgaaagttcggctattcgcttgtagccgatcactttcggaatctgtgtgttggcgtgcatccccgtcaatttgtcttcctctttgataagcgggtctaagataagcttgtgagagaaacggcgtgccagttccagatacttcttgtcgcctgtgatttcggccacgtcagcgaacgtttcgtttaatccgccatgttcgctacgaagcatatcctgcatttgttcgtcactcaagccggaagtgatatcgatcatccagtctgtaaaagcgataagcatttggtgtgcaaggtcgcttcctgcatagatatatgcatcccgcaatccggcgtaagtcttatgtatattgtataaaggtacccatttgccgttaaggtcgaaacctccggcacggatctttcctgcttttatatctttccaaagttgaaggcttcccggagttcctccgatgaatcctgtgccgacagtttgctgtgcccgattcaactcattcagcatgtagttgaggcgattatagactgcggtatctccggtggcggcatacatcatggaaagtgcggataaataatgtccgccgatatgtccgtccaatccggtattttcccaattggtgtagctgggggctttaggctgtaaccctgcttcgcggagaaaaggagcgagcagacggtcggggtctaatgcaagtatgtaatgtagatcagtctgttgagcttgcagaaacggactatccaatagtttcacattttgtaaagggaagtaagacacctgtggagcgttttgagctttggccagtgaggtggacaggacaagtgcaagtatgaacgaggtggttttcatgataatagtctccccatctccctctccaaaagaggagaggggtggagataattaatgttaatacttagttagaattggctcttgataaacagcgatttatcggcaatctctgatgaacaacaatggattgccgactgtcaattatttaaatttgactgctgcctcttcgataggcaatcctgccttgtaattttcgatgtatgcattgaagccggctacatcttcgggcgtaggtgatacctcgatacccgcgtcaccgacaaatacgctttcatccagaaaatcggcaagagattgtttcttttcattgttcacgaggtaagaacctaacagggcaataccccaggcaccaccttcaccggctgtttccatcacggaaataggcgagttgatggctgcagcaagtattctttggcctactccctttgttctgaataatcctccgtgaccagtaattctgtccactttgattttttcttcgttgaacaggatgtcgttaccaatcttgagtactcctaccgaagcatacaagtgagtccgcataaagtttgccaggttgaacttgtcatttgccgaacgtacaaacaaaggtcttccgtcagcaagtcctgttacaggctcgcctgaaatataattgtatgaaagcaaacctccacaatcagtatcaccagtgagcgcaatattgtagagtttactatagatttcatccatatctacaggtatgcccagaagctcctggtattccttgaacaagttaacccatgcgttgagatcagaagtgcagttgttgcaatgcaccatggctaccagacttccgtcaggagttgtcaccatgtcaatcatttcgtatggcttcgacagttctttctccaatacaatcattgagaatgaagaggtacctgcggatacatttccggtacgttgtttgactgcgttagtcgcaaccattccggtacctgcgtctccttccggcggacaaaccggtattcctgccttcaaatgacccgatgcatcgagttttttacttccttccggagtgaggacaccggcattttcaccagctgacaatactttaggcagaatatcttccagtttccagttatattctttcggagcaatcagtttgttgaacttagccaccatttcagccgaatagttatgggtagtcggatcaataggaagcatacctgatgcatcacctattcccagcaccttttcgcctgtgatctgccaatgcacataacctgctagagtggtcaggaagtcgatttcattaacgtgtgattcattgtctaaaatagcctgatacaagtgggaaatgctccaacgcagagggatattatagacaaatagttcggataaagcagccgctgcgcgacctgtattagtgtttctccaagtgcggaaaggcacgaggatttcttcttttttgttgaatggcatataaccatgcatcatagcgctgacaccgatggcagccagagtctcgatctctatgccgtatgcattctttacgttagtacgaagatcagcataacaatcttgcagccctgaccagatggcttcaatgctatacgtccaaagtccgtcaactaactggttttcccaagtgtggctaccttgagcaataggcttgttttcctggtcgatcaagacagcttttattcgtgtagaaccgagttctataccaagaattgctttacctgcctcgatggttgattttgcatctaatttcatgttgaaatcaatattttaaggtataacgatcattataaaaaaatcaagtttcgcaaaaacttaacgaaataattaagccatgcgaaacttgaataattgtttttagcaaagtgctttattcaacatgtaataaacttcgttcatgcgcagttctttcttgaagcagctgatcgtagtatccttgttaatatgcaccatttcgatacctgcgatttcagcataatcttcccaatattctgctgtcaggtcgtaagagaagcaagagtggtgagttccaccagccagaatccatgcacctgcacctacttcaaggtttggcatcggaatccagagagcagaagcaaccggcaacttaggcagcggtttcggctcgatacattctacgtcgttcacgatcaggcggaaacggttacccatatctacaacagtagcagtacagcctgtacctacttttgaagtgaagaccagacgtgcagtctgactcttgcggatacctataccgaggaagtgtacttccaggcgaggtttgttggctgcgataagcggacagatttccaacatgtgtgactgaaggatagagctgtttgcaccatcgaagttcagtgtgtaatcttccaggaatgaacagcctttaggaagaccctgattcattacccatacagtgcggtacagagcagccgatttccagtcaccttcagcaccgaatccataaccttccgccatcagacgttgtgaagcaagacccgggatttgatcgaaaccattgtattcaatgtcgcccaaatcgtcgaagttggtagtaaatcctttggcaccttttgctttcaggatagcacgtatagccagttcagccttggcagcattccatactttctggtaagcttcagttgatttatcttccagagaagcatcgtgatcgtattccttgaagtaagtagctaccaatgcatctacctcttcatttttgatatccttgtgatattccatcaattcgcttaccggacagtaatctacgtggtaacccatacgttgttcagcttccactttatcaccatcggttacagctacgttgttcatctgatcgccgaaacggataatcagcatatcctgtgaatctgcccaaccggcacaaacacgcatccaaacggcaatcttatgcaaagtctcttcctctttccagtagcctaccactactttacgacggatacgcatacgggtacagatatgtccgaattcgcggtcaccgtgagcagactggttcaggttcatgaaatccatgtccattgtatcccaaggaatttccttgttgaattgagtatgcaggtgcaacaaaggcttcttcaactgttgcaagccgtgaatccacattttagcaggagagaacgtatgcatccaagtgataacaccgacacacttttcgtcattattggctgctttgaaaacagcttccacttctttagaagaattagctgttcctttgtataccacctttacaggaagtttaccggattcgttcaatccgttaaccatttcattagagtgtgcatctactgcgattactgcgtcacctccgtacaaaagctgtgctcctgttacgaaccatacttcatattgattaaatgcgttcataatgttattgctttaattgttattgttctaatttttaatctttaattatttctgtccgtaataagcattcggaccatgcttgcggctgaaatgtttttctatcagcagcggattcattgttaaattgggattcaccgcataagcgatacttgccattttagctacctgttccataaccacagcattgtgtacggcatcatacgcgtcttttccccaagagaaaggaccatgatttttcaccaatactcccggtgtatgtacagggttcaagccttcaaaacgtttcactatcacattaccggtttccagctcgtaagcacctttcacttccgcttctgtcatatccgctgtgcagggaatggcatcatggaaataatctgcatgagtggttccgatattcggaatgtcacatccggcttgtgcccaggctgtagcataggtagagtgcgtatgtaccactcctccgatctccggaaatgctttgtaaagtactacgtgagtaggagtatccgaggatggcttcagccgtccttcaacgaccttgccatccagatccactactaccatatcttcggctttcatatcatcataacttacaccactgggtttgattactaccaatccgctttcacggtcgatggcagaaacatttccccaagtaaagatgactaatccatgctttaccaattcgagattggcatgaaatactttttcttttagttcttccagcataatgattataatttaaatttcgggtccttgcggtaagccttgctattgaacttatataaggcagcaccacgtttcgaacccagtttgtcaattttatcagtcttttctatataatccatttcagccactcttttacggaaattccgtttatccattgtttcaccgtaaatggcttcatataaactttgtaattgggataatgtaaatagcttcggcaatagattgaaaccgatgggctctacagatgctttctgtttcatcagttcccgtgctttttctaccatttcaggatggtcgaagataagcgggggaagttcatttatattcacccagtaagcattgtgtttctgaacctgtttccggtcatactcattgatgttaatcaatgcataataagccacggagataacccgttcacccggatcgcgatcgatagctccaaaagctcccacctgttccatgtaaacgttttccagtccggtaagctcatgcaatacacgtttagcggcatcatccacactttcattgttttgtacaaatcctcccatcagtgaccattcacccattgccggctcgaagtttctctttaacaataacaggctgatttccccttcgtagaaaccgaaaatgatacagtctatgccgacatagaaggccggattcgagctataataaaccttttcccgccccttttccaaagagggggaattagaggttatcattggctcttgtgaattatctttatccatttagattgtgattttagttataataaaacagtctttccgtagataagactattttcaggcttctctttcaacccttccctaagaggagggttgaaagagaagcttatttttaccagaaataccagtagaaagcagcagtaatggccagaataattaccgtatgaataatatcccagtgattccagcttgcacgtgtagcggctttttgttccttagtagccgtaccgaatactagtccctgaatcttttctgcagttggagcttctgttgccagactgactacgattactacaataatacagaacaggaacatccatccacagaagaataaccagttcatgtcatagaacaaatatttgaatgtagaatcagctacttcacctgcgttgctataatatacttttgcgccgaggcgggtcaacccgattaccatgccggagatcaatccccacataccaccctgggcggaagtacgtttccagcagatccccagtaagaaagcggcagcgatacctggtgccaatacagactgaacatcctgcaagtaagtataaagtacatcacctacactacgcatgataggaatccaaagaatacctaaaacaacgattacaattgttgcaatctgaccgatacccaccagcttcttttccggagtttccggtttgaaacgtttgtaaaagtcgatagtaaacaacatggctgatgagttaaacagagatgcaagggaactcatcaaagcggcaagaataccacatactaccaaacctttcacgcccgcaggaagtaatttggctactaatgtcgggaaggcggcatcagcatttgctgttccgttagccagcatcggtaagaaaccttcaccaccggcaccgatatatttttgatgtaatgcaaatgcaatcataccaggaatcaagaaaaggaatacgggtagcagtttcagataagcaccgaaaatagtaccacgacgagcttccatttcatttttacctgaaagtacacgttgtacgatgaactggtcggtacaccagtaccagaaaccgataatagccgaaccgatcaaagcacccaaccaagggaagtttgcatcatcgttgctacgaatcaggttagtcattgtatcaccgtaatcatttacagtaacagcgccgcagactctcatcatttcgtcccatccacctaattctttgaaaccgagcactagaattattaatgatcctagcagtaggataggggtttgaagaacagaagtgtaaagaactgatttcataccaccgaagatagtataaagcgcagttaacactaccagaccgatagctgcaatccagaagaaatcaattccccaaagctctttgatgccgaatacttgttggaatacgaggccaccggcataaacagttacggctactttggtcaatacataacttacaagagaaattacagataaaatagtacgtgattgaggattataacgacgctccaggaattccggcattgtatataccatgcttcgtgtatagaaaggaacgaatacccatcccaaaatcaagatcatccatccctggatttcccagtgtgccatagccataccactggatgctccggctcctgccagtccgatcaaatgttccgaaccaatgtttgatgcaaagatagaggcaccgattgcaagccatgttgcgtcgcgtccacccaaaaaataatccgccgagtcattttgtttttgtctgactacccaaacaataataccgatcagagccagaaaaaagactccgattactagccaatctaatgcttccacaataaatatgatttataagttaatattatttctctacagagaatttgaaaatacattcgctattataagtttgtcccggttccagtacaacagaaggccagtctgccttgttggggctatctggatagtgttgtgtttccaggcagacagaagcacgttggttgtaaacgatacctttctttccggttacggttccatcaaggaagtttcctgtgtaaacctgtacacccggttcgttggtatatacttccagagtgatgccgctttcaggtgaagttagtttggctgctacttgagaaagatctcccttagtgttgagcacccagttgtggtcatacccttttccgttcttcagttgaacgaaatcataattgttgatctctttacctaccgctttcggagtggtgaagtccatcggagtgtcttttaccggagcgatttcgcctgtagtcataaaagtactgtctaccggagtataatagtctgcgttcacatacagtatgttgtcagttgaagcttttgacggatcaccagccaggttgaagtaagaatggttggtcatattgatgatcgtctttttatcggtagttgcgctatatttgatgtcgatagcgttgtcttcagttagtttataggtcactttagctgttacattccccgggaagttttcgtctccgtccggtgagacaagtgtcagttccaacgttgtcggatcaatcagattagcttcataaactttgtattgccaacctttcggacctccatgcaggcagtggccgaaattgttttgcggcagttggatggtatcaccgtccaatgcgaaacgtccctggttgatacggtttgcatagcgtccgatagaagcaccaaagtcgctgggtacattaatatagtcagcaatgctgtcaaaacctaaaactacatcctgcatcttaccgttcttatcgggtaccatgacagacacgatacgtcctccgaagttagtgatgcatacttccatacctgccttgttctttaaggtataaagagctgtttgggcattgttcacttctgtttgaaattttaccgggtcgagaccggacaaggtcagctcggaagccggcttgttattgcacgcagccagcatcagcgcggcaaatcctgcaagtagaaaatgttttttcatggttttatttttaatgtaaatgagatgcttatcttattttgggtgtaaaagtaacactttcgtttggtgtatcaaatacactcttatatgttgtgcagcataaatggtgtattttatgattttccatacaccttattatatataaatgtacgctttccatccgtttgtttttcatataatagagcgtgcaaataggtgctttttaatctggtttcgtattataaatatcagatgcggatggaaaattgtgcaaatgaatggaatttgatcctttttgaccgataaacacctattaatgataaatttgggtacggagaaaatagagaatctgattatctttggattttaactatatataattttttattgagaaccatgagaagatacgcaaatttattggcagtattagccttgtctactaaccttgcccttcatgctcaaaccaatgagttggtgatacagacgaagaagctgggtgcagaaatccaacctactatgtatggactcttttttgaggacatcaactacgctgccgacggcggactttatgccgaactggtgaagaatcgttcctttgagtttccacaacacctgatgggatggaaaacgtatggaaaagtgtcattaatgaacgatggtccttttgagcgtaatccgcattatgtgcgcctttccgaccccggacacgcacataagcataccggattggataacgaaggtttcttcggcatcggtgtcaagaagggagaggagtatcgtttctctgtttgggcgcgtttgccgcaaggaagtacgaaagaaacattgagaatcgaacttgtagatacccaatcaatgggcgaacgtcaggcacttgttgcagggaatcttacgattgattctaaggactggaaaaaataccagataatcttgaagcccggcagtactcatccgaaatccgtacttcgtattttccttacttccaaaggaacagtagatttggagcacgtctctcttttcccggttgatacttggaagggacacgaaaatggtcttcgtaaagatttggcacaagcactggcggatattcatcccggagtctttcgctttcccggtggttgcattgtagaaggtaccgacctggagactcgttacgactggaaaaaatcagttggcccggtagagaaccgtcccttaaatgaaaatcgttggcagtatacttttactcaccgattcttccctgattattatcaaagctatggattgggattctacgaatatttcctgttgtctgaagaaatgggtgcggcacctctgccaattctgaattgcgggctttcctgccaatatcagaataatgatccgaaagctcacgtagccgtttgtgatttggataactatattcaggatgcactcgacctgattgagtttgctaatggagacgtgaataccacatggggaaaggtacgtgccgatatgggacatcctgcaccgtttaacctgaagtttgtcggtatcggtaacgaacaatggggaaaagaatatcccgaacgtctcgaaccgtttatcaaagccattcgtaaagctcacccggaaattaaaatagtaggtagctccggtccgaattccgaaggaaaagaatttgattacttgtggcctgaaatgaaacgtctgaaagccgatttggtggatgaacatttctatcgtcccgaaagttggttcctggcacaaggtgcccgctatgacaactacgatcgtaaaggtccgaaagtctttgccggcgaatatgcctgtcatggaaaaggaaagaaatggaaccattatcatgctgctttgctcgaagctgctttcatgaccggattggaacgtaatgctgacatcgtccacatggccacctatgctccgctttttgctcatgtggaaggatggcaatggcgtcctgatatgatttggttcgataacctgaactctgtgcgtaccactagctattatgtacaacaactgtatgcacaaaacaaaggaacaaatgttcttccccttaccatgaacaagaaaaatgtaatgggagccgaaggacagaacggactctttgccagtgctgtttacgataaggataagaatgaactgattgtaaaggttgccaatacttccgccacaatacagccaatttccttgaattttgaaggattgaaaaaacaagatgtactgtctgatggccgttgtatcaaacttcgttcgattgatttggataaggataatacacttgagcaaccttttgccatcgttccgcaggaaactccggtatctattgaaggcaacgtgtttactaccgaactggaacccactacgttcgcggtatataaattcacgaagaaataagtaaaactaattagatgttactagatcaataggttttagatttttgttaattgtaaaaagtaagggcggctcccatcacggaagccgcccttcttacttatttaataacgaataaattcttattccagtctacgagaaccgtcgccgattactacgtcatacactttcgggcttctgccgaatttagctttgaaagcagcttttgttttttcaacgaagttgtcatacaactcatccttaacaaggttgatcgtacaaccaccgaagccaccacccattacgcgtgagccggttacaccgtattctttagcgcagtcattcaggaagtcgagttcttcgcagcttacttcgtacagcttgctcatgccgtgatgagtttcgtacatcttcttacctacagtttcgtaatcatccttttccaatgcctcgcaaacatcgagtacacgttggatttcttcgattacatattctgcacgcatatagtcttcagcgctgatatcagctttcgcttcttccagcatagccatcgtacagtcgcgcaggaattctacgtgcggatgttttttctggatagcggcaacagcagcttcacagctttggcgacgcttgttgtaagcagaagaagccaattcgtgtttaaccactgaatccatcagaaccagacgatagccttccggatggaatgggaaatactgatattccagtgaacggcaatccagacggatcaagctgcctgctttaccgaacacagaagcaaactggtccatgataccgcagttaacaccgcagtagttatgttctgttgcctgacccactttagccaattcaaatttatctattttgttttcaccgaacaattcgttcaatgcgaaagcatacgtactttccaaagcagcagaagaagacatacctgcacccagaggcacatcacctgcaaaagcagtattgaatcccttcacgtcaacgccacgtttaatcatttcacggcatacaccgaaaatatatcttgcccagctggcacgtggagcatcctcttcgttcagaccaaattctacatagtctttcaagtcgatagagtaagctttaaccttatcagtaccgtttggtttgatttcagcaatcatgcctttgtctacggctcccggaaatacgaatccaccgttgtagtcagtgtgttcaccgatcaggttgatacggcccggagaagcatataaaaatccagtagttccgtcaaagtgtttaatgaagcgacttcttacgtattctgtatccatgatatttatattttaaaggtgaataataatatagagaattatgatttctgatttctgaattatgagctatgaacaattcataattcagaaatcagaaatcgaaatttattccacaggaatatccttgtttacatttttgcaacctactaggccgtagaacagcaggtaagcaagtgcggcgatgataacccagtagctaggcatgaaaccggcgatgtcagccacccaaccttggataacaggcaggatacctccaccacaaaccagtaccataaacagaccggaagcagcagccagatattttcctaatccttctactgcaaggttgaaaataccaccccacatgatagaagtacaaagacctactaataccaaatacatagcgttgataggtacttcagcaaaaccgaatgacaaaccgccggtagcactctgttgaagtacaggcaggttaaccaatgttccggtagaagagaagatagcaaggaatactaaaatcaaacccagtgcagatgtaaacgtaagcatcgctttactggaaattttagcaccgagtgatgcgcctgccagacggccgatcaacattaagaaccaataagttcctaccacgaaacctgaaatcgtagaagcgatacctgctccgcctttttctacagggtctgtcaggaatagattcaaagtacccggtacaccaacttcaatacctacatatacaaagattgcaatagctcccaagatgaaatgacggaactttaaagcacccttcatcaatttgccgataggctctgttgcagcattggcattaggttcggggatttgtacaaacagaagtacgaagaatgcgaaagcgaacacagccatagcagtgtacatcacagggaatatttgagaaatagtagctttttcgatagatccggcgatcaggatacctacaaacatcggagtaatggtagccattacagagttgaaagatccacctacctggataagctggttacctttgttaccttcaccacccagtttgttcaacatcgggtttacaacagtgttaagcaaacacatagagaaacctgctacgaatgcaccaatcaaataaacggcaaatgccatttccgggcttgaatgaccggataagaattggatacctacaccaatgaaaccgatagctactgcgatcagtgctgttttcttataacccacgcgttgcaacaggataccgctcggaatacccattactgcgtatgcaataaagtttccgaagtttcccagcatacctaatgcgtttgatacgtcaaactggtttttcaacacgatacccataggagcagcgaggttggtaacaaatgaaatcataccaaaaaggaaaatcatcgtaatgattgcaatgattttaccgttctttttttcttgtgtcatggttcaaaaaaaatgttagtttataaaattaggttagttgttttttcaaatcttattcttctactgcaaacttgtagacagtgatctgttggtattcatcacccggcagcaaagtagccgatgggaaatgcggtttgttcggggtatccgggaaacactgtgcttcaaagcagatagcgcttcttgcagggaatgtagctccgtgtgcgccttcaaatccattcagccagttgcctgtatagagttgcacgccggcttcggtggtatacacttccatgatacggccgcttttcgggtctttgcaagtagcagctaggtcgagtgagccgctctctatcttgttcagtacatagcagtggtcgtaaccggcaccgaaaatcagttgctggaatttgtcattgatacgttcgcctacggtatgcggagtacggaaatccatcggagtaccctctactttggcaatttcgcctgttgggatagaaacttcgtcgataggcgtatagaaatcagcgttgatagtaacgatgtggtcgttgacggtaggagtagagataccggcgaggttgaagaaaccgtggttagtcagatttacgactgtggctttgtcggttgttgcgcggtattcgatagtcagtgcgtttacttcgttttccaggcggtaggtcatttctacttccaggttgccggggaatccttcttcgccatcggcagaaacatagttgaattgcactgtgctctcgtcaagttgtatagcgtcccatacacgagcgtggaaaccggtaggtcctccgtgcagggagttaggtccgttgttgattgtgagttcatgttcttcgccgaacagagtgaattttcctttggcgatgcggttgccgtagcgtccgatagtagtgcttaggaaaggttccgggctgttgatgacgtggtcgatgctgtcgtgtccgaggattacattggcatacttaccgtttttgtccggtaccatgatagaaagaatggcgcatccgtaattggttacagctacttccattccctttgtatttttgaggataaataaatcagttttcttatcatttatatccttttggaaatctttccggctgagccctgatagattcccttctgttgggaatgtgttattcatgtctggtattattaaaaatttcctgcaaataaagggaaattctttctttctcacaaattattccgactaaatataacaggtgctttaggaaagtttagctttattacttcatgtttttttcggaaatgacaaaagtcttgccgttgatacagaattggaattgaaaaatattcgatatataaacgaaagaatctttcttaaatgaattttcatccttcttttcttaaaaagtgaacaattttttgtatgtttgttcccggattgtaacaatccgagcgaatttaatctaagtttataacaagaaaaactaaaatgtatccattaaaattcgaacctattctgaagcagacgctttgggggggcgacaaaattattccgttcaagcatttgaactctgacttgaaaggagtaggagaaagctgggagatttccggtgttgaggacaatgaatccgttgtggctaatggcccggataaaggtttaaccttagccgatatggtaagaaagtatcgtgaggaactggttggtgaagcgaattatgcccgtttcggcaacaaatttccgctactcattaagttcatcgacgccaaacaggatttgtcaatccaggtacacccaacagatgagttggcgaagaaacgccataattcgatgggaaaaaccgagatgtggtatgtggtagatgccgacaaaggagctaaattgcgttcaggattctctgaacagattaccccgaaagaatataaagaacgcgtgttgaacaatacgattaccgacgtattgcaggaatatgagatccatccgggtgatgtgtttttccttcctgccggacgcgtacacagcatcggggcaggttctttcatcgccgagattcagcaaacctctgatattacttatcgtatttacgacttcaaccgtaaagatgcgaatggtaaaacccgcgaacttcacaccgacttagcccgtgaagccatcaactacgaagtgttggatgactatcgcactaaatacgaaccgttgaaggacgaaccggtagaactggttgcctgcacctacttcacgacttctctgtatgacatgactgaagaaatcagttgcgactattccgaactcgattcattcgtgatctttatctgtatggaaggatcctgcaagatgagagacaatgaaggcaatgaactgactgttagtgccggagaatctattttgttgcctgcaactacacaagacatcacaatcactcctgaaggaggaaatgtgaaattgttggaaacatacgtataagagattattatacagaattaaagtcatccgactttgctccattctagtgatggacaaagccggatgactttttttattaccaatagagtaaaaacggcaggaaagtctttaactatatttatcaaaaactttgcgttgaagacacaaaaagattcgttcttttgccacttgccaagtggcataatatataaaataactagtgatgcaaatgatgaacaaaaatggatttagccggtgtgcggaattctacatcggtcgtttgcgaaaggagggacggcattctacggcgcatgtctacaagaatgccctcttttctttcagcaaattttgcggcacgtctaacgtgtcgttcagacagatcacccgtgagcgtttacggcgttacggtcagtatctttatgagtgtggcttgaagcccaatacgatttctacgtatatgcgtatgcttcgtagtatctataaccgtggagtggaagcgggcagtgcgccatacgtgccgcgactgtttcatgatgtttatacaggtgtggatgtccgccagaaaaaggctctgcctgctacggaattgcataagcttctgtatgaagatcccaaatcggaacgtttacgccgtacgcaagctatcgctgctctgatgtttcagttttgtggaatgtcatttgccgatttagcccatttggagaagtcggctttgaatcagaatgtgttgcgatacaatcgtatcaaaaccaaaactccgatgagcgtggaagtgctgaatactgcaaaggaaatgattaaccagctccgtagtaaggaaagttctcaccccgattgtccggattatctgtttgatattcttcgtggggataagaaacggaaagatgaaagaggttatcgggaatatcagtccgctcttcgtcgatttaataataatctgaaggacctggcaagaaccttgcatttgcaatctcctgtcacttcctatacgcttcgtcattcctgggcaacgactgcgaagtatcggggagtatccattgaaatgattagtgaatcattgggccataaatctataaaaaccacacaaatctatttgaaaggctttgagcttaaagaacgtacggaggtaaataaagggaatttatcttacgtaagaaactgctgtgtaggcagaaatgaaagcgtaaagttctaataatcagaactgatatatgtgtgttacttcttaggtaacggaacttaaatttgacgcaaagatagacaaaaacataaatagtaagcaaatattcttccattttttttcgttttatctaaaatataggaaaaaaactatccgaacatgaaataagattattttcatgccctatactttttattgcctaatctctggattcttcccgttgagtattaggctgtttccttcttatgccctatttctatatgtgatttccattttttgttgagatgtgtgccttgtgtatgtattgtccgttacctaagaagtaacggaagaacatgaggtaaaaaaacatgattttaacaaagccgaaatcaattagtgctgggcctagcgatgggacaggggaaggcgtagcacactctaaacgctggtatgttgctctggttcgtatgcatcatgagaagaaagtagccgaacgtttagataaaatagggattgagaattttgttcctgttcagcaggaaattcatcagtggagtgaccggcgcaagatggttgagtctgtccttcttccaatgatggtgtttgtacacgttaatccgaaagaacgcaaagaagttctaagtttttctacagtgagccgttatatggtgatgcgtggtgagagctctccagcggtgattccagatgagcagatggctcgttttcgtttcatgctcgactattcagaggaagctatttgtatgaatagctctcctttggcacgtggtgagaaggttcgtgttgtgaaaggacctctgaccgggctggttggtgaactggttaatgtagatggcaaaagcaagattgccgtccggctgaatatgctgggatgcgcttgcgtgaatatgcctattggttatgtcgaggctatctgcgagaaaaactagtactcgtcatcatttatccacaaattacatgaatatgaagttttcttgtgcttttgcactgatattctctttcttcttcttttcagcttgtcaatcctataagaaagtaccttatttgcaggatgcggaggttttgaaacaggtgaatacgcaagtttcccctgttcaggacgcaaggttgataccgggggatgaggtttccattcttgtttctacttccgatccggttgtttcgcagccattcaatgcacaaggcagtacctttttgttggatgaccagggaaatatcaattatccggttttaggtaaactccctttaaacggattaacgagtcgcgaagctgaaaacctgataacggagcgactgaaatcttacgtgaaagaaagacctacggtagtagtccgtatgtccggttttaaagtttcggttttgggagaagtggcgtctccgggtgtttatccggtggtgaatgagcagatcaatgtactcgaagcccttgccatggcaggagatttgaccatttatggtgttcgtgataatgtgaaactaatccgcgaagacaagaacgggcataaacagtttgttacactcaatctgaacgacgcggatttgttattatctccttactatcagttgcaacagaatgacatcctgtatgtcactcccaataaaaccaaagcacagagcgcggacatcggaacaagtaccacgatgtggatttcgggattttccatcttagtgtctattgccagtctgctggttaatatacttagatgatccctacaactctccatattctttgatacagttaaaacacggacattccttcatcggatttaaatcatgatggcctacaatcaatgctttggggaatcttttcctcaattcgcggagcaaagcgagcaaggaacctcgttgcgccaatgtacgtgtgtcttggggacgtccggcaatatccagccctccttcgtaacaaatacctatcgaatgggtgttatggtcacggcagtgtgctccgaccttttccagaggacggccctggcaaatttctccatcgcgggtgatgtagaaatggtaaccaatgtcacggaacccgcggtgttggatatgatcttgtcggcaagcctccgccgaaaggaattttccttccggcgtggcactgcaatgaatgataatcagcgtgatggtgcgcatggggctacatacaactttgtactccgatcaagcctccgatagcggtggcaacggtgataatcactttgataatgaagctccatacggagcggggagaagatgaattactcataaagaagaggttttaaataaattaataatattcccttaggcagccgggtcaggtgcttcaccgcttccgcccggatttggattcggcgtattgcctgaatcggaatctccaccaggagtagttggtttctgatactccgcttgctgcttcagttgactgtcgagtttcaggttggtagtcgacaaattaccggtggcacgagctttaagacgcatacctgtgatgtttttctctaacgaaaaatcttccagcgtatcagccgccttactgcgaatacctaccccaaagatggcaaggtcgtcgattttcacgcatttgccgtcgagcagcaattctttgatgcagtctaccatgtcagaaagtacacctttgatgacaccaccggaatacggtgaattgtgtttcgacatgtgttcggcaagcttggccaaatcaaacgtctcgtcgcttaccgcacgggcgaaccacttgcctgcattcaggcctttctgctgttggttttgataaattttgtaacgaatcataaaacaataaattaaagggttaaacatattgtccggggattcttttccccttccgacaatacaaagatactaccctgaaatatcgataaatcaattgtttgcgattgcacacgattgttgtcaattatatgtcgtaatggtcgtttattcaatggaaaagcgttggttatgtggtactattttgttatttttgtaactgtaaatcagaattttatccattatgaccgaattcaaaatacgtgcctatgggcgcatggaactggcgcaactttattctccgacacttaccgacattgctgcttatcgaaaaatgaagaaatggatctctttatgtcccggacttctgcaacgcctgtacgacttaggttacgaatcaaagcgtcgttcattcaccccgttggaggtgagagtgattgtagatgccttgggagaaccttagaagagcggagaagtaaagcaccgctttaggattcatgaaacgtcttgttgttatataaatgcaaagaatgcactttttccgagggctccctaacacacgcacacatgcgtgcgcgtataaacgcctttatcgtctgtattgataagcaatcctttttttatcagacggttcagccagctaagagcagtgttaggtttgattttcatgattgtagcctgctccgacaactgtgcacgggtgaattggttgcccattgcttcgaaaagtgcatcccggtcggcattggctctatgcttgacttctgtggagggaagaaaagacaagatatgcgtggcatgacgataaagcggagttacaagctccagaaccgctttaaaatcttcagcggtgatcgttacatcccaacgggtgataatgccgtctttgatattatcagtggcaatctccttatcaggagtaagcagatggatagaagaattcttgaattggtaaggttgatcacattccaatgcacgtatcatagctacttctgccatgatacggcacgtgttgacagccagtcgggcgatggaactgctcatttcgttgtcgttggcaagtcccgaacggaagaacaaatcggaaaagagagtgttgaactcttgcttttgctcgtcggtgagccggagcgtatggactccatgtgttttcatcaggtcgagttgctttttccattccaggcctatgtctgtgaagatagcttccagatcggcttcgccactttcaaactgattgatccatgcccatataccatgcatgtaataaaacagttggcgcgagaacaaaccgttctctgtcgagggaataagtggtttcacttgtgcgggcgtaccggaaagcaggacggacagatagcttttctttacttcccggtattcctggtcggtacgccggttgtacgacaaacggtcatggtcgaacgctttgcggagcgtgtcgctccagtgtccgtattccgagccgatggcagcagaaatagtatctgcttccgtttcgcagataagtcctgtgccgttggcatccatgatattttgcagaatacctgttccggtgttattgcccgagatgagaaacattctgtttttgggcatttggggagcttccactttgctacgctcttttcccatgacgtcgtaggcggctttctctttcttgtaagccttgacctctgtcgctacttgttggcggatctcgtcatggataggttcgacgagcagacggataagcgaaagaattcccttacccgaggcagaaggagccacgatgaaactttgcaggcaaggagactggagtttgccggcgtatggacatctcacatatcgttccatgctggcacctatggcagtcaatgctccaatcagcatgacgtcacgctgggtagggctggtggcatagctcatgatgagcaagaggattttcggccagtccgcttcggggaaagtgggcaatggctggttcgggtcactaccgttcagcagctcttcggattcgtccggttcgtcattctccaccttattatatacgtgtgcgtgtgtgagaactttggacggtgtattttccgtattttctgtatttctacggttgttcataacttccgtattacagagtttcacattggccgtctcggcaagatggaaagccgtacccaggtgtacttccccatgccgggtagtgagagcattggagaatatccgttcggcatgttcacgttggtacttggcggacatccggcacaaacggtggaaaaactcgcgtcccgcttctccgcaatctgttgcgatggcaaacgccagttgtacatattcagcataggtaggagcaatatccgctcctgcagtttcaaccgcttcagtgaggcggcgtaaagattcaatatcagtcattattttgatttatgatttataatttatgatttatggttattcgttggtggctctaaataatgctcccgggtcatggcaaaggaagcaggatctcacaatgtctttaccggaaaagtccacgccttttttcttttctccgaaaggaggaggtgttcctgtaccatagatcatcacagtgtataacattgctaacttcattttttccgtaatacagtttgcgtcatcggccatgggtaaatgattatagggtatgaaggcttttacgcctcgtccgctaggactgataaacgtgagcacagggtggagaagaggatcattgaacaacgtcttacgcatctccactgcttcctgataggaggtgagatagtctatatctactactgttaggagggaaggatctatgaggcatttgctgctgcgacgcgagaatgtaccacagggagtcacgtatggtaatagtgatgcttttgccgtccgtatatcttcggagttgcgtacttgttcggtcagaactttgagattctcgttgcaggtaatcatttgaaagacttgctctacggagacttcgcagcagggaataagcgtaggaggagtaactagttgtccgtgttcgtctttaatgggcgcaatgggaggcatgaaataagacattctaaaatcgtttgtcataacgtatctaattatttgattatcgccttgaattttcaaaacgcggggcgaaggtaggaatagcttttaaatcaactgttctgacatatcagaacagttataggtagaatcatgtattatttaataactttaacaattaacagaattacaaaaatgaaaaagtactctcatgtagcactcggccttttcatcgccgagcagtttaagaaagcaggtgtgaagatagctcccatgtgcgctgaaataggtttgggcaaagctgtctactatgcaaaggttataaaaggggagacgttcgtttaagccatttcacccgtcttttggcttacttctatgactgtcataccaaagaggaatttcgagccaaagcaattgaatgggtcgaccgttatattgattatcgtgagaaacacgggtgatgggaaagaaatttaatcaattgataataaaataatgcaggaagtccaacgtttcaataaagtcctaaaatcttttgtccttctaggggacatcatcttattgaacttgctgttatggatgtttacttcgatctgggaaaaccggtctctatttgagtattcaatgcctcttctccagaatatggctctgatgactttatgttatctggtttgcaacatccgttcaggagtgatccttcatcgtccggtggttcgcccggaacaaattatgcttcgggtggcccggaatatgattccttttgtattgatagtctttgggctttcatatatattccattttgaatgtgtcaatctgcgtcagttgggggtattttatatagttctcattatcgttatcatttcctatcgtctgatgttccgatctattctggagctttatcgcaaaagtggggaaaatgtccgaaaggtagtgttggtgggtagccatgaaaatatgcaggaactttatcattccatgacggatgatccgacatccgggtatcgtgtattgggatattttgaagattttccgtcagaccgctatcctatgaacatagcttatttgggacagccgtgtgaagctgttgattatttgactcgtaatgcgggaaaggtagaccaactttattgtagtcttccttccgcccgtagtgttgaaatagtgccgattatcaactattgtgagaatcatctgattcgtttctttagcgttcccaatgtccggaactatttgaaacggagaatgtattttgaaatgttaggtaatgtcccggtactttctatccgtcgtgagccacttgagttattggagaaccgtattatgaaacgtggctttgatattatttgctcgctactgtttctttgtacccttttcccgattatatacatcattgtgggactggctataaagataagttcacctgggcctgtctttttcaaacagaaacgaagtggggaggatggtcgtgaattctggtgttataagtttcgttcaatgcgggtaaatgctcaatgtgatacattacaggctacagaacatgatcctcgtaaaacccgaattggcgatctgattcgtaagacgaatgtggatgaacttcctcaatttattaatgtcctgaaaggggatatgtctttagtgggtccccgtccgcacatgttgaagcacacagaagaatattctcatttaataaataaatatatggttcgtcattttgtaaagccgggtattacaggctgggcacaggtgacaggtttccgtggagaaacgaaggagctttggcagatggaaggacgtgtgcaacgtgacatctggtatattgagcattggacgtttcttttggatttatatatcatgtataagactgtgtataatgtaatccgcggggataaagaggcttattaggcgaagagttggaatttgaataaaaattaaatcaatagttgtaatttacatgagtaggtggttatgagaaaattgaaacgattgactttgggtgcgttacttgcttttttgctggtatcctgccaatcatataagaaagtgccttatttgcaggatacggcttttgtgaatgatacagaacagagtgttcgtcagacaggtgtgaaggttatgcccaaggatttgttgacgattgccgtatcttgttctactccggaactggctgcacctttcaatctggtaaattcgggtactgctaatggaacagagggaaagacggtaggacaaggaaacgcgtcatctgctctacagcaatatttagtagataatcaagggaatataaactttccagtgttaggagagattcatgtaggtggattgactaaactggagatagaaaatctgattatagataagttgaaggtttatttaaaagaagcaccgcttgtaactgtgcgtattgttaattatcggatttcagtgttgggtgaagtcgctagtccgggtagttttgtggtttctaacgaaaagattaatttgctggaagcactcgctatggcaggtgatttgactatttatggtatgcgcgataatgtgaaattaatccggactggactggataataaacaggagattataactctggacttgaataaggccgaaacggtactttcgccttattatcagctacaacagaatgatataatttatgtgacacctaataagactaaggcgaagaattcggatattggggccagtaccggcttgtggttctctggcatttcaattttgatgtcaatagccaatttattaataactatattacgataaaattaataaaataattgatcaacaatgaaagaaaatccgtacgaaaataatatgaatgaacaggatgaggagaaaatcaattatcaggaacttcttttcagatatataatccattggccttggtttgtcgcttctgttttggtctgtctgattggtgcctgggtgtatttacattttcaaactcccgtgtatcaagtttccgcttccatcatgattaaggatgataagaagggcagtggttctactgatttggggaacttgggaataggtggagtaattacttccacgcaaggtattgataatgaaatagaagtcttgcgttcaaaaacaatattgaaagaagtggtcaataatctggaactttatatcacttattatgatgaggatgaatttccggaaaaagagttgtatcagacttctccagtcatagtcaacctgacagcccaagaagcggataaattgccgggttctgctttgcttgccatgaaattgtctcctgaaggcgttctggatgtaaatctgaaagtcggtttgaatgaatataatcagcgttttgaaaaactgcctgccgtcttacctactgacgcgggtacgtttggatttgcgttgaaagattcattgtcaggcggtcagatggaggggcataaaggtgaacggcatatccgcgcggtggtcagccgaccatttggagtggcaaagggatatcagggcgcgttaagtatagccccgacttctaggactacttctgttgccgtggtctcattgatgaatacgaatatacaacgtgcccgtgactttatcaataagttgatggagatgtataaccggaatacgaataatgacaagaatgaggtggctgaaaagacgagggaatttatcaatgagcgtattaaaattatagacgaggaactgggtagtacggaggataagctggaagcttttaaaagaaacgcaggcttgacggacattagcagtgacgctcaattggccgtatctggaaatgcggaatatgaaaagaggcgtgtggataacggaacacagataaatttagttcgtgatctcattaaatacatcaataatccgttgaatgagtatgaactgttacctggtaatattggtttgtctgacgctggactgaccacccagataggacgttataatgaattgataatcgaacgtaagcgtttgcttcgtacttctacggagagtaatccgatgattgtgaatctggatacgagtattcgtgcaatgaagtcaaacgtgcaggctgcaattaatggaactttgcagggcttgcttattgtcaaggctgatttggagcgtgaggcgggccgcttctcccgtcgtatcagtgacgctccgggacaggaacggcagtatgtgagtattgcacgtcaacaggaaatcaaggcagggctttatttgatgcttttgcagaaacgtgaagagaatgctattacattagctgctactgcgaataatgccaagattattgacgaaccagtggcgacaggaggaccgctttctccaaaacctaatatgatttatatgattgctctggtactaggagtggggatgcctgttggtgtcatttttctgataggtctaacaaaattcaagattgaaggtcgtggtgatgtggagaaattaacaaggttacctattgtcggtgatgtaccgttaaccaacgagaaagcaggttctattgctgtgtttgagaatcaaaatactttaatgagtgagactttccgtcatatccgtactaaccttcagtttatgcttgagaatgatcagaaagtaattttagtgacttcgacagttagtggtgagggcaagtcttttatttcttcaaatcttgcgattagtctgtctttgttaggaaagagggtaataattgtagggcttgatattcgtaaacccggtttgaataaaatttttaatatcccccgaaaggagcaaggaattactcaatacctgtcaaatccggagaagaatctaatggatttcgttcagccttcggatgttagtaagaatttatatattcttcctggtggaatagtaccacctaatcctacggaattactggctcgtgatggtttagataaagcgattgaaacattgaaaaagaactttgactatgtaattttggatactgcccctgctggtatggttactgatactttgcttgtaggtcgtgttgctgacttgtctgtttatgtatgtcgtgctgattatagccgaaaagcagagtttaccttgattaatgagttggctgctgataataaacttcccaatatctgtaccattattaatggtcttgatctcaaaaagaagaaatatggttattattatggttacggtaaatatggtaaatactatggttatggtaaacgttatggctatggatacggctatggagaacatacggtaaaggaagaataaatatctaaaatagtaagtactcaacaataataatatatgaatatagcaattgtaggcacaggctatgttggcttggtgtccggtacttgttttgcagaaatgggtgccactgtgacttgtgttgacgtagataccgataagatcagcaagttgaaagccggtgaaatgcctatttatgaaccggggttggaagaattagtaaaacgcaacgttggctatgggcgtcttcactttacaacagatttgatcgaagttttggatgatgtggaagtcgtcttttccgcagtaggaactcctcctgacgaagatggtagcgccgatctgaagtatgtgcttgccgtagcccgtcagtttggacaaaacatcaataaatataccattctggtcaccaaatctactgtacctgtgggtactgctcaaaaggtgaaggctgtcattcaagaggagttgaacaagcgtggggcagatgttcccttcgatgtagccagtaaccccgaattcttgaaagagggggccgctatcaaagactttatgagtcctgatcgggtggtggttggcgttgagagcaagaaagccgaagaggtgatgaccaagctttatcaacctttcttgctccagaatttccgtgtaatctttatggatattccttctgccgaaatgactaagtatgctgccaatgctatgctggccactcgtatcagctttatgaacgatattgccaatttgtgcgagcgggtaggggctaacgtagatcatgtgcgcaaaggtattggggctgatgtgcgtatcgggcaaaaattcctttatgccggttgtggatatggcggtagctgctttccgaaagatgtgaaagctttgatgcatacaggtatcgacaacggttatcacatggaggtgattgaagcggtggaacgtgtcaacgaccgtcagaagagtattgtttatgataaacttatccgtttgatgggtgatgtaaaaggtaaaactatcgctatgttaggtttagcttttaaacctgatactgatgatatgcgtgaagctccagctctagtagtcattgataagttgctgaaggatggtgctaccgtgaaagtgtttgatcccatcgctatgcctgaatgtaaacgtcgtatcggcaatgttgtgacttatactgaaaatctctatgactgtgccgatggtgctgatgcgttgctgctgatgactgaatggcgacaattccgcctgcctacttggaacgtgattcagaaggtgatgactgataagtatatcgtagatggacgtaacatttggaatcgtgtggagctggaagaaatgggatttagttatacacggattggagagaaatagagtaaaataatagtggattaacagtatttctggcattatacgttttcaaagaatactaatgatagtgggtgttacggtatggagaagaatagtagaaaagacagttttgatgttgtgaaatgttttgcggcattttttgtggtgcaattgcatactattcctgcgactgtgtgtccgttattgaatgtaattgcacgactggctgttcctttgtttttcttaatcacgggttattattacacatctattgtagaaaaaggaaaatatggagtgcaactgaaaaagatctttttgttggctattgcatcttctctgttttattggatatactatggctgtatggctctaaaaaataatgtgttctatcaatggtttatggacacttttaattctatatcgatactgaattgggtgcttataaatgacactccaggcattgggcatttgtggtatctatatgctatgctttattcatttatagctatttatgttatagataaattgaaaatcaaagttaaatgggtgattcctattctttttcttattggattatatgtaggatgcaaagggtggccttattcatggtatcgtaattgggcatttatgggcgttccttatatccttttggggcgtataatatttgagtataaagaaatgttaatatataaactggggggggtaaaaatagtttactttattcctgctgctactatcggcctgttgggtgaatataaattgtatgaaatagtaggtatggatcctattcgtgatcattatgtttttataatattgatgagtggaattctttttattttggcattacaatatccttattttggcaaaggaagtgttgtcgcaataataggaagggagtattctgtatttatttatattctacatattttcattcttagaatattgtctttctatatagatttttcttcttcattaatgataagattcctatgccctattattgtatttgtgtgtacaattgtagttgctacttatattattaatatgtataaattgttgtcgaaaaagtgtgtaactatttaatattgctgaatttttatctgcgttcatgaatcaatctactgtatcaaataataaactgctagttaaaaattctttgatgctctatcttaggatgttcgtaaatatgggagttagcctatttacgtcaagactaattctgaatgctttaggagaaaccgattttggtatctataatgtagttggtggtattgtagtgatgtttacattcattaatggctctatgaatagttctacttctcgtttcttgactgtgagtttggcaaaaggaaattcccaagaattgaaggcaacttttagctttgctgttactattcatgccatattagcttttattattttactcttggcagaaacttttggcttatggtttttttaccataagatgattataccagcagagaggatggatacagcatttatcttatatcagctttctataataactacgatgttgtctataatgagtgtgccttacaattcttctattatttcacatgagaagatgaatgcttttgcttatattagtatttcggatgtagtctttaaattgctgattgtgtatattgtcatttatttgccttgggataaattattgctttatgcattattgctgtttattacgcagatagtcaatcaactcatttatatcatatattgtcaggtacattttgaagaggcaaaatatagtttaacatggaataaaaagctatttgtggaaatgtgtggctttgcaggttggaacatgactggtaatttcgcttttgtctgttatacgcaaggtttaaacttgctgataaatatgttttttggtccatcggtgaatgctgccagaggaattgcgatccgagtacaaggtattatttctaattttgcatccaattttcaaacagccattcacccacaaataacaaaaaattacgcagttgggaattatgagtatatgcaaaaactgatttttgctgaatcaaaattttcattatatttacttttattgttgtctttgcctgtacttgttgaagcacaattgatattgaactggtggcttgtaaatgtaccggagaatactgttgtatttttgaggatcatgttgtttacgacttatatagagaccacaactaatccccttctagtgtctgctttagcaactggtaatgttaaaaaattgcagctggtaatctgccctctattattatgtattcttcctttgtcttatctttttttgaagtttggagcacctgcttattctgtctttatagtaaatttgcttattttatttctctcattaataattcgagtctttatgcttaaaccttttattggtttatctcccaagcattattttgtagatgttatcattcgatgtatgggcgttggaattttatcttctgtactgccaatttctttttacctgatcgtagagctaccatttattcgttttcttacagtgtgcttatcgtctgtactatctgtcattactatggtatattttattgggatgaaccatcaagaacggttatttgccaagataaaaatcagaaatatgataaagaatagaaatcttccaataaagaactaatagttatgatttcaattgttattgcagcatataatgcggctccttttataggtatttgtataaatagttgtctgagtctgatggaagcagaagcggagattattgttataaatgacggtagtacagataatactttgactatttgcaatcagatggctagtcggcactccaatatttttgttttctcacaggataatcaaggtgttagtgcagcacgcaatgaagggcttttgagggcccataatgaatgggttttatttatggatgctgatgattggttaaataaacgtgatatggaatttcttattacgaatttgaagcagcttggtgaagctattgatatttgtacatttggttataatacaattctgcaggataagattatagagcatcgtgaacaggatagggtgtgtgcaccaatagagattttaaattctgcatcatttaaattggcaagttggaattatgtgtttcgacgtactctattgataaataatgatataaatttccctgaaggtgtgatttgtacagaagatcaaaacttcaatataaaagcattgtgtcaagcccgcgtagtgcaatctttcaatttgatagtttataattataattgtacaaatatatattctgcttcacataagaaacactcggaggcatggattaagagtcggttgctttctgctaacaatatattatcttattgtatattgcacgatgtgcctttacttaatgtttatgttcaagtaaaaaggttgtatgaatcttatatgaatgattttacaacagatatatcggtgaaggaaagagcaagtttctttatctctgaatataataagaccgtttcttatttgcctgaaataaagaatataagaaagtttagattgtgctattataacatgtggttggggcttttgctttttaaaattcataaaattatagtttacataaaaaacagatgagtatgtggttatcaaaactgaaaagagtattttctaatatgctgtatattgatgaaataatagatgatattgtttcatataaacttagattcttaaaacttgatgtatttgcaaatattaacaaattgggggggtaaatttgcatccttttgtagatagccaaggctatacgcatactgtgacggtatctttaacttcttatggtgatagagtatattctgtatgctatgtaatatatagcattttgatgcaatccgtacaacctaacagaataatactatggctttctgaacaagaatataatgatgaaaatttgccacaatcattgaaagatttgagaagtaggggggtggaaatagcttattgtccggattaccgttcgtataagaagattattcctactctccggaaatattcggaagatgtaattataacaatagatgatgatgtgctgtatggacatgaaactttagaatatttgattaatgcttatttacaggaacctgaatatatttggtttatgagtggtagtaagatggcctttgataaaaatggaaacataaaaccttatgtaacttggtatgatgagcatttgacggcattagaatgtaatattaagaattttcctacaggaattggaggtatcttatatcctcctcattctttggctgaagaagtgactgacgagactttatttatgaaattagctcctactgccgatgatatttggttgaaagcaatgtctttaaagcaaggtacaaattgcaggcaaataaaattaaataagcctgtaatgcgcttccatactggtataaaggaagtgcaaactagtgcattgtgtaaggataatatagaaaaaaatctgaatgataaggctgtgcacgctgtttttgattattttgatttgtggaaactgtttaattagataactattttatgcatctttgtaattttactttcattattcctcataaaaatataccctctttattacaacggtgtattgactctatccctcaaagggaagatgtgcatatcgtagtagttgatgataatagtgattcttgtcaagtggattttagccatttcccgggtcttaataatccttttgtggaggttatatttacgaaagaaggatatggagcaggttatgctcgtaatgtagggttaaaacaagtacagagtaaatgggttttatttgcagatgcagatgatttttttacgccagaattgaatgtctttttggataaatataaagattctactgcagatgtagtttttattactaataatacgattgattgtgatacattcattccacaaaatcaagatttaaaagtggcggaattagctaaagagtgtaatcatgaaaatgaatctgatcctttaagatacaagtctcaacctccatggacaaaaatggtgaagatgtcgttaataaatcagtatcatatcatgttcgatgagacacctgcttcaaatgatgtatggtatagtgtacaagttggattttatgcgcgaaaaatagaaatttctaaagaaatagtatatacaagaacaattagacagggatctttgcaatattctcttgataaagagaggctgttagctcgtttgaaggtaggatataaagttaatactttcttaaggaatcatggaaaaattaaatattataatgagatatgggggtatttattagatcttcgcaaaattagctatccattgttttttatacagttttttaaatatatatataagaccccttttttcattgtaaaaaaacatttgaaatacaaattcttaaaacttttcagatgaatagtatattttatcgtttaaagaggaaaatactaaaaatgttttgttcgaaactagcgtatatgttttgggaggataatgagtctcttcgtagtcatgtaggtaattattatactagaacatgcaaagtagttggtgagttttctgctccttgtttgattatgatggtagatgggcgtttcccacatggtggtttggcggatagattgcgtggatgtattaatctgtataagtttgcaaaagaaaggggtatggattttagaatttattggaaatctccttttgatattcatgaatacttaacttgcaatgaatatgattggaaaatagatcaagatgaaatatcttattttatgggtgattctttccctgttactttgggcagttattataagcaatattctttatctgaagcaaaagaagcggagtttcaatatcaaaagatgaatgagattatagattcccatctacatataaaacagtttcatttttatactaatgctcactttgtagatgataaggaatatgccgaattatttaaagaactttttgttccttccgaaggactccaagaaaagatttctttttatagcaaggtacataattattctccatatctttcaatggcttttagatttaggcaattattaggtgattttgaggatgcgtctggtggagaagtattgtcagtggcagaacggaaacaatacattgaggatagtttgcatcttatagataaggtttatgaagaaaataatggtgagcaaatgatatttgtgacttctgatagtaaagactttatcaaagccgctagtgaaaaatcgtatgtatttactgtttccggtgaaatagtgcatattgataaacagtgtacattagtaaaaacagattatagtaaagagtttcttgatatgttgatgttagcacggagtagttttatttatgtatgcaaaaaagagcgtatgtttacgtctggattttcgttaaatgctgctaaattgggggggggtaatatttaaaataattaaatattaaactgtcgtaatagtataactagataagtattaacactgaagctaaaacaaggctagcatgaatgactttaagcattttatcctaactcgtttcaatatacctttcattcgtaaagatagtgtagactttctattttctgattcttatttgaatgaacgttattctatatttgagaatacatgtttctcttcaatgtgtaatcaaaaaaataaagattttatatggttggtattttttgataaaagaacgcccaagtcttttgtacatcggaatgaacaattacagaagttgtgcaaaaattttaagccaatttatgttgatatgaattatatagccaatttagcaattgaatcgtcttatgtaatatacgctaatgagattgctcctgttaatgagaatgattatggtgtaatgatggggcgaatatggttggctgaatactacaatttgctgattcgttcgtattgtgaagattctatagaatatgtgataacaacccgtattgataacgatgattgttttgagtgtgatatggtagaggctgtaaagaagtatgcaacaatcgatacggttgatcatattttaagttttgatatggggatacagtattttaataatacgtgtatagctcaacgcttttattatcctaataatcattttacatcgatgctcgaaaagctggataaacccttgcgaactgtattttattgggatcatttctttgtagaggaatttatgcctgtaattcatatttcagaaaagccactgtggctcgaaatattacataactcgaatgcgataaatactataaaattgaatcgtaaaaatagtttatatttgtcagggcttgatttgcatccttttggcattgatctcaaatattcatcgataaagattcttgtttcgttgttaataaatcctagactctatttatatccgtggattaagtatattttacatctcgctgcactaaaaaagtttctgaaaaagtgatgagtgttccttttatttcaattatagtaccagtatataatgttgctcaatttttatcgataacattggatagtattctgaatcagcagtatactaattatgaaattattctgatcaatgatggatcaactgatgaaagtgcggagatagcacagcgatatgcttctaatgatcagcgtatagtttttatagataagtgcaatgaaggtgttgctacaacacgtaataaggggttagaagtaagtagagggaattatatcatgttcttggatgcggatgacataatatatcctaacacactagataaaatagctgcaatgcttcgaacaacaaatgccgatttattgagatttgagcatcagactatagatgaagaaggaaatgaactgtatccaaattacaatataagaaggcgtaagaaatatgttggttgtgaattggacgcggctactttcatgaacaaaattttattaaatgagtactatatgtgtctcaatatctttaaatcctcgcttattaaatctcatcatatttcatttttaccagattgtacttataatgaggatacactatttatattgaaaagtttattatatagcaagaaaaacttttatattccaatcaaggtgtatgggtataggaaatatagtgaagctgtgactgctaagttttcaatgaagaattatgaggatgtgaaactagtgtttactgaaattattcaaatgtctgaaaacataactaataatttgaggacttcctttaagactgttgcagaaagtcttgccattcatctttatttggagaagtctaatatgaatgttcttgatggtgatctagatgctattatatgtcaatgtacaaataggccggttatggtggaatggaaatgtatctctttgttgggggataaaggttttaagttatggaggagtctttttcttcttaaaaggatattaaatcgattaatgtaatagaggtagatataatgatccatcaattcctaaataaagactccaaaacaaactggggttatatcattggatatttcatattattcttgattgcacctccttttattgctattcccaccataatagtttatatggtcactaaatcccatgcgactaaatctgattattatctgtgtttctttgctattgcaggttattttgcagctattaatgccacgaaacgtatggggggagatcaatggcaatattatgttgcttatatgaatgttccagatgtggggttctggaaatcattggtttacatctatggaatagactattttaaagattcgtctagaatgcaagtttcaggagagtttatgaatggtatatataactatttgggatattatcttacctttggttattatcctctgtatgcagcgttgttgacttttatggactacttgcttgttttttggggattacgcagattttgtttatcaatgaagaaaccgcatatacctataatagccgggatttttacattatcgtttttttatcttttttttcaatataccttgcaaattcaaaagcaatttcttgcccagtgtattatgatgtacgttttaggaaattatgcctattatggtaaaatgcgaaagaaggattggattatggctgtttgtgcagtgtttactcatgctgcaacgttgctctttgtacctttctttattttcaaacctctacatcgcagattaacgaaaaagggcttgttttttattggagcagcttttgctatactaattattatagctcctagattggcatcaggtatagcaacagatactagttctgctttgacatatggtgtatctcgcttggcgaccagtgaaactcttaatgatacggagtttggccttgtatgggctcaagtctttataatagctcttcctatggcattaattgcattccgcaaactatggctagaacgtaaaacattatctgatagtagtgcctttattctgaatattactcttttattattgcttactatagtagcaatgtatagacagccattagcgcaatatcgttattttatgatgttatttgccttcatgccttttatttatccttttgcttttgataatatcagaaatagggatatgttgcttaaagtgattgcagtagtgatgattttgtggttttactatcagttcgaactaattgtttgggattatgcttctctagtggatattattattaagagtccgatttttctgttatttggtaattattatacggtatagtagatatgcatatttgttttgtctgtcgtgaatatccaccttcattaagaggtggtggaatagcttcgtacataaaagaagttgtacatggtttacatgcagttggacatcaaattacagtgatttgcgcatcggataatacatgtcaagaatcaatgtatgatgatgaaggtatatgcgtaatacgtcttagagggggggattttcttattcctgaagtcgagaagccttctttatggaagaaatttcgtcctctatatcgtttttatagttatcgtaagcgcattgtgctagctataaggacgttaggtgatgtggatataatagaagtgcctgaatatggagcagaagggtatttcttacatcaactgaatattcccgtggtggtacgattgcatacaccaatgttactcgatcattatagattttctcttcaatctttctcaaaaaataattggcattactactggcaaggaaaaaaggagctccaagagatgaaaaaagctgcctatttgtcatcatgtagtacttcgctcaaaatatgggcagaacagtatgccggagtaatgaaagacagagcgcgggtgatttataatcctattgatatgaatgcgtggaagggctttcagagaaaagaagaataccgtgaagtgaaagagattctttttgctggtactatttgtgattggaaaggatgtggcgatttagcggaagcttgccgaatacttcatcaagagaatgcttcttgccagtttcgtttaagtttagtgggaaaaactggaatttttgcggaacaattacatgctaagtatggagatgaaccttggtttaatttagtaggtaaggtacaacgtgaggagttgatggaaagatatactaccgctgatgtaatttgttttccttcatggtgggaaaatatgcctatggtatgtattgaagcgatgctttgcggaggaatagtattaggtagtagttcgggcggtatgagtgaaattattgaggatggtaaaagtggatttctgatagaacctcgtaatcctcgatgtttagccgataaaataaggcagatatttaatttatcggaaggagagagggccaatgtctcattgagcgctaagcagcgtatcaaaaatgctttcagcttggatatgattataaagcagcagattccttattataaggaagtggtagaggattataagaataagtaaatatgattaacagagattatagcgtgactattcgtacgttgggaacagccgaagataaatatcaacgcacattggatagtattgccacacaaagcattcagcctaaagaagtaattattgttttggctaatggttatgaatgccctaaagagcaattggggtatgaacgttttgtgtttgtagataagggtatggtcaatcagcgtgttgcgtgttttgatgagtcttcttcagaatatactttagccttagacgatgatgtagagttttcctcaaattttgtggcttctttatttgatactatggaaaagtgtaaagcggattttgtttctccgctggtaaaagaagtgaacatttcgggggggggtagatatacactaattaataaaataaaagattggctattgggcgtttctattagaaaacgtttgaaagattcattcatggtgaaagtatggcgtactggtggatttatagtgaatagtgcggtagaagataataaacagtattatagtcaaagtggtcatggtacgtgtgtgttcggacgtacaaaagccttgaaagagttgcattttgaagaagagttatggttgcaagatgccaagtatgcattaccagatgatatggtgatgttctataaactttatttgagaggtaatgtgattgctatgaatcgtgaggtggagtttgtacatcttgatgctggttcttcgctaatggatgacaataaaaaattgaataatatatatgcttcggctcgtaatggtttaatcttttggcatcggttcatttataaatgtagggataagaaatggctatctatactgtgtattgtccgacgcatattctttacttctcttttctccttactcaaaggagtcgtaaaacgggatatgcgctattttaatacttatgtaaaaggatatagggatggatggaaatacattcattaaagaaaaacaatgaaaatactttggatttcaccgtggttcggtaattaccgaataccggtatatgaaaatttaaataaactttgtagtggtaatttctacttgatttgttcagaagagaatacttcagaactggtaagagggaagttgaaagcggtattaggtaatcatgctattgtgatgagtggtgaacaacgtatgacaatggggagtgatgagtcggactttgccaatagtgcgttagtaataaagaagcaaccaggtttgtataagactgtgaaatctgtggaggcagatgtgattattactgaaggctttgggggatgggctcccgctggtattcgctatgcggtgacacatcgaaaaaaactttgtatgttctatgaacgcacagcttacgtggaacgtaactcccctacatggcggtcgatgtatcgccgattggtaggtatacctgtggattattttctaattaatggtacgcttacagaggaatatttgaatgagggcttgcactttaagagaactccgaaagtaaaaggttgtatgtgtgcggatagttttggcttatcacaggcagtggaaaaagtaactagggcagacaaagacgctctgcgcgaagaattaaaattaaaagatggactgactttccttttcgtgggtcagatggtggaacgcaagggtatcaaggaattacttgcagtatgggggcggcatattactgaatatccaaacgataacttattggtaataggtaaagggattttagaaaagcctctaaaagaactgtatgcgggggataattctattcatatcatgggtggtatcaattacgatgaactctataaatactatgcactttgtgatgtatttatcatgcctacgcttgaggataattggtgtttggtgataccggaggcaatggcatgtggcaaacctgtggcttgttctatttataatggtggtcattatgaactggtgcaagatggggtgaatgggtataagttcgatcctttgaagcctgaatccattatagatatattagcaaaatttcatcaagctgatttgtcggctatgggacaaaaggcgattgaaatagaaagtaattatacgcctgataaggcggcggcccgcatctttgaggcttgtgaaaaagtatataagcgatgaagattgattgtagtaatatgcctaatggggcaagcaaactaaactttatattgcgctatattttcaatcagttacgtacgtggtatatgtttcatatacgttatccatgggtgaaatatgagggttttgtacgagtaatgaaaggcacgggctttgcacagaatatggatgtacggataggacataatgtgcaattcggtgattactgcaatgtagcttccaatgtgtattttgggaataatattttgatggcaggtcgtgtatgttttgtggggcgccaagaccatacattttctattccgggcaaaacaatatggagtggtgagcgtggagataatggtattactattattgaggatgatgtgtggattggtactgccgctatcattatgagtggggttacaataggcagagggagtattgtagctgccggatcggtggtaacgaaagatataccgtcttgtgagatatggggtggagtaccagcaaggaagattcgtgataggtttgaaacggaagaagagaagaaatatcatatttgtcatgcaaattttaaataatcaaagatatgtacaataaatcgaggattgcaatattaatggctacttataatggagagtgttatttaaattatcagatagaatctattatggggcagtcttttgaggactggacactatacataagggatgatggctcttctgattctactgtagaaatagtgcgtgaatattgtaaaaaagatagtcgtattatgttggttgatgatgaaattaagcataggggagcaaagaaaagttttatttggctattggaaaatattcattctgaatattatatgttttctgatcaggatgatatatggttacctcataaaatagaatctacttacttaaagatgcttgaaatggaaagtgttaatcctactacacccattttagttcatacggatttggctattgcagatgaagatggtttcgttgtgaagggatcgcggtataaatatgacaaactttatcctgattggttagataaattgaattggtttattgtatcttatcgaatatgtggcaatacgattatgctaaacgataaggcaaaagtggtagcacttccttttgatgatagaatctatatgcatgactggtgggtagtgttaatgactcttaaaatggggggggtagtttgtaatttaaagaaaagtacaattctttatagacaacacagacaacaagttgttggtttgaaaagctttaattctattgaaaaaaaagaagatggtaaaatatctaattttttaataaggttgaaaggtaatttctatcagtacagtttactgaatgaatgggttggtatttcattttctaattatatatttcataaactcgtattttggatatataggttattggaaaaacgtggatgagacttcatcttttagaataaagaggaatacatatgaatacaaataaatacgctgttagcataattttgccatgttataatgtgtcacaatatatagaaagagctattgatagcatactgatacaagattttaaagattatgagattataatcataaatgatggtagtacagataatttattgcaaaaatgtgatgatttaggatatacagagaaaggttatatcaaaatattgtcttttaagaatcaaggattatctcaagctcggaatgaaggtttaaagatagctcaaggagagtatgtgtatttctttgatcctgatgattatataaatcaaggaatgttatccaaagtttatttaaaagcaaaagagggtaattatgatgcagtacattttggtttccaaactatttatgaagatcaaggaggtatacattatgacaaagctgaatcaccatacgtatatcagacaaatgacgaaataatacataactatcttcctcgctttttaggtataactcaagataatataaatagttttgtagacttgaatcatctgtggaatagtaaagaattctctggagtatggcgatttttatataagagatctgttctaatagataataaaatattatttcctaagggaattaaattaatagaagataaattgtttaatgctagattcttttgttatgctaaaacgatagcgctgatggatgatgtgttgtataattatgtaattaaagaaaagggcttattgacttcgtctttaaataatgttaaggggctagtggaagataaaataataggtattgagcagagggctatcttacgaaatctttatttgaaagagaaaaatatagatattttttcatattatattggtactattgtgtttagtgctttagaattgataatgcgtttatctgatatatctttcttctcttctaggaaagaattgaaacgatatatgaatatggaggatgttagagttggaattaaggaaatagatgtgtcccacttgcctttaaaattgcgtttgcctattgtaatgttgaaatatcgtttgacttatttattattaggtggaatgagagttcttaaaatgatgggattaaaagttaatatttgaatcatagtatgaaacgtaatatatctttggatatagcaagagggctaagtattgtgctgattgtattgagtcacactccttttggttactcatatctctttgatttcttctatgtacaggtctttttctttttgagtggagtttttataaaatcttcgcatacagtagaaaatagtttatataagaaagtgaaagctttgatatatccttacctgttttttgcagttatcagttctatcgctgtattaatgttgggtagaaatactattgacggaattcatctttatgatcccgactcgtttgataatgggcctctttggtttctaatagcattatttacattaaatattatgttcttattacttaatgaactgcctcaatatgtgcgtttttgtatgttgtgggtaatttttggtgtttgctattatttaggactgaatggaatagatgactatacagatattaccaaagctggtatttcgctccctatcttgcttgcagggaattattatttaaaaatagaacctttttttagaaaataccgatatgtaatttgtttgctttcgatattgttatgtgcactctttatttgggtgatacctgtacatataggaatccgttggatgaaacttccagataatatattgttatatctactagcttctttttcgggtattgcttttattttgtctattagttgtattgtagagtcaattcttatattacgtaaaagtttatcatttcttggaggttattctctttttattttgtgtatgcattggcctataatacgaatgttatatgataaggctcatatttcaaataataatattattgcttttgtagttggtgcaattgtgtgttttactacggcaggtataggtgtgattctgaaaaaatattgtcgttttttctttaaatagagttggcaaaaatgaagcaaagaaatattagtattgatattttgaaatgttttgctgcactgattattaccaactcgcatatggatatactttatccaaagtttggtgcattagctactggtggtgcaattggtgatgctctttttttcttttgttctggtttcactctatttttgggtagaatggggcgatttgataattggtataaacgacgcattaaccgtatttatcctactatttttgcatgggcaatacttggttctttactatttggttatcaaaataatataaacaatgtacttctatccggagggggatggtttgttagttgcataatgttatattatgtgttgttatattttatacaacgctatatgtttaaatacttaagattagcatttatggcagtagcaatagcatgtgctgtttactttatgttaataaatactccaatggattttaatatgtatggagcgggatattttaagtggtttcatttcttcatgtttatgttgatgggagcgatgatgggtatttcacaacgagaatacaagtatcattttgtatgggatggattgaaactgataggatgtgttgtagcattttatgcactatatgcctttaaagatattgcggtatataataaatttcagatgttgacttggattccattgttgggtacagtattctattttttcaagttatgcaactctgattttatgaaaaaggcctatcatcattgtacagtaggctggattatcaaactggttggtggcttgtgcttagagatatatttggtgcaaactgctttgtttacagataagatgaatgcagtctttccgcttaacttaatcgtaatgtttgcaattatagtatttgcagcgtatatcttacgttgcagtgcaaggctatttgcacagacattcaaggatatggattatgattggagggcagtgtttaaagctgtataagtattaagatgaatctaactaaggaacattctatacaaattaaaggagtagccattctttgtatggtattatttcatttatttggttttcctgaacgtattccaactagtgtgcagtggatgggaatgcctattatcaaggcacttcagatatgcgtacctatatacctttttatggcagggtatggtttgcaatgtatagtagcaaagggaacagtaacatggatgagcattggaaaacggttgaagaaattatacctgtctttttggtgggtagcgataccatttatttctgtcggttgtattgtaggatattatgcccctgatgtaaaaaacatcttttataatttatcggggcttacaacttcatgcaatggggaatggtggtttttttcgctctatgcggagttactcgttttattttactttgtcagtaagatcaaattaggatggaaaggttatctgctattgatgttgggtttattgattcttacaaggggggtaaactgcgcattacatttagatgaggaggtgattgtggagaggcatctgaaaatgatattaatagatttgaatatctttatgctgggctgtttctttgctaagtttaatattttcggatggctgcatgaacgatgttattggctctatgaaaaaatatacttggctccgttacttcttgtgataccgattttagtgcgagcttatttgcctcttattggtgttacagagttgctgatagttcctatgttttgtatagggattgttaatatatgtaaaacggggggggggtaaaatcttacttttctttggaaaacattcaatgaatctttggcttgttcattcattcttcattttttattttttgaatggtatttcttttattacaaatagtcctcttgtgatgtttattactgtattaggatgttctttgctatgttctataatcatagagctcataaaatctaagattcatatttaattttatatgctttctattttaattaacgcctacgcatgttcaccgaatatgggtagcgaaccgggtatggcttggaattggtgtgtaaacttggctaagtattgcgaactacacatcattactgaaggtgaattctgtgacaaaatagaggcggtagtacctacattgccgcaaggtggtaatatgcacttctattataatccggtatcggaagaggtgagaaggatgtgttggaatcaaggcgactggcgtttttataaacactatcgtacttggcaatatcgcacgtatgagatgactcttgatattatgaagatgcatcatattgatatagtgcatcaactcaatatgattggttttcgtgaaccgggatatctttggaagatagaggaagttccgtttgtgtggggacctatcggaggattgaaacaattcccattggcataccttgaaggggctggattaaaaatgaaactgtttaatagattgaagaatattattaatgtgcttcagctgaaatacgataaacgagtaaatgctgcttttaaaaaagctgatgttttagtcagttctataccagattcttatcgagccattaaaagatataaaagattggaatcagtggtaataccggaaacgggatgtttccctttggcatgcgtttctacagaacgatttgataatgccattttccatgttttatgggtagggaaatttgattttcggaaactgttgcctttggctttgaaagcgattgctgcaacgaagaatgaacgaatcttattagatgtttatggtacaggtacagatgaccaagtttctacagcaaaggctttatcagtgtcgttgggtattgctgatcgagtgatatggcatgggaatagaccaaatcatgaagtgcataagaatatgcgttcttcccagatatttttatttactagtgtgagtgaagatacttccactgtagtgttagaagctgtaagtaatcagttgccagtagtgtgttttgatgtttgtggtatggctacagtcatagatgaaacagttggtcgtaagataacgttgtcatctccaatacaatcagtcaaggattttgctaaagtattgaatgaattagaagcagatagaagtttgttaaaacaactgtcattaaattgtcgtcaacgacaagaagaattgtcttgggataataaggtaaaacagatgctggaactgtataaatcatgctttttcaccgtatagtgatacgttttgatgagagctaagaaataatttccgcaaaatccgcaaaataagtgaatgaaattaatcctctaattttttaatttcatatgattaagttaaaagaactctctatcatggagagtataaatcaactaaaagcattaccgcaaggtaagttgctaataaacacaattaatgcacattcttacaacactgccctaaaggatccactctttgccaatgcattgataaaaggagatgcgctcatccctgacggggcaagcattgtgaaagtttgtaaatggctaaagatgcaaagccaaccgcgagaacgaatagcaggttgggatctctttgtttttgagatgaatcgccttaatgagaaaggaggtcgatgtatgtttatgggtagctcggagaatgttttggcattgattaaacaacgggcagcagtggattatccgaacttggaagtggtgacttattcacctccttataaaccagaattttcacaggaagataatgtagctattgtggcggctattaatgaggcaaatccagatctgttatggattggtatgacggctcccaagcaggagaaatggatttacagtaattggcaaaaattgaatattcattgtcatgtgggtaccgtaggggcggtgtttgacttttacgctggtactactgaacgggctccattatggtggcaacaacattcgttggaatggctctaccgattgataaaagaacctaagcgaatgtggcgtaggtacttgattggtaatgtgttgttcttgtggaatatttgtaaagagatatagattatacaatgacatgaaaggtattgttttagctggtggtagcggtacgcgtttgtatcctattaccaaaggcattagcaaacagctgattcctatttttgataaaccgatgatttattatccaatttcagttttgatgttggcgggtattcgtgagatattgattatctctactccacatgacttgccgggatttaagcgcttgctgggtgatggtagtgattatggcgtgaggtttgaatatgcagaacaaccgtcacctgatggattggcacaggcctttatcattggtgaggattttattggtagtgattcggtctgtttggtgttaggtgataacatctttcatggtaatggctttagtaccatgttgaaagaggcggtatacatggcagaaaaggagcaaaaagctaccgtgtttggttattgggtaagtgatccggaacgctatggtgtggcggagtttgatgacgagggtaattgcttaagcattgaggaaaaacctgtacagccaaaatcgaattatgcggtagtagggctttatttctatcctaataaagtggtagatgtagcgaagcacattaaaccgtcagctcgtggagaattggagattaccactgtgaaccagcgatttctggaggatagtgagttgaaagtacagacactgggacgtggcttcgcttggttggatacggggacacacgactcgttgagtgaagcatcgacctttattgaggtgattgaaaaacgccagggactgaaagttgcttgtctggaaggtatagcgtttagacaaggctggattgatgctggcaagatgcgtgagttggccccaccgatgctgaagaatcaatatgggcagtatttgttgcaggtagtagaggaagtggaacgtacaggaaagagtaatttatgaataaaagaaatattatcattaccggtggagccggatttataggcagtcatgtggtacgtttgtttgtgaacaagtatcccgattaccatattatcaatctggacaagttgacttatgcgggaaatctggctaacttaaaagatgtagagaataaaccaaactacacttttgtaaaagcggatatttgtgattttgagatgatgctgaagatttttaaacagtatcatatagatggggtcattcatttagctgccgaaagtcatgtggatcgtagtatcagggatccgtttacttttgctcgtactaatgttcttggaactctctctttattacaagctgccagattaacttgggagtatcttccggaaggctatgagggtaagcatttctatcatatttcaactgatgaggtgtatggagcattggaattgacgcacccggaaggcaagtcttcggatatatctgcacacgaagtatatggcgatgagttcttcaaagagacaacaaagtataatccacactcaccctattcggcttcgaaagcgggtagtgatcactttgtacgcgcttttcatgatacttacggtatgccgactattgtgacaaactgttcgaacaactatggaccttatcagtttcccgaaaagctgattccgctgtttattaacaatattcgccaccgcaaaccgttacctgtgtatggtaagggagagaatgtgcgcgactggctctacgtggtagatcatgcaagggccatagatgtgatttttcataagggtaaggtagcggatacatataacatcggcggctttaacgagtggaagaacatagacattatccatgtgattattaagactgtggaccgattactaggtaatcctgaaggacacagcgaggaactgattacttatgtaatggaccgtatgggacatgacttacgctatgctattgactctacgaaactgaagaatgaattgggctgggagcctagtctgcagtttgaagagggtattgagaagacggtgcagtggtatctggataatcaggagtggatggataatatcaccagtggtgcttacgagagctattacgaggatatgtataagaatagataatctatatggaagttgttaagacaaatattgaaggggtggtaatcattgaaccgcgtctttttaaggatgacagggggtatttcttcgaatcgttctcgcaaagggagtttgacgaaaaggtacgtcctattaagtttgtacaagataatgaaagtatgtcctcgtatggagtgatgaggggactacattttcaaactatgccttacagccaaagcaagttagtacgttgcgtaaagggtgcagtgctggatgtggctgttgatatccgcaaaggttcgcctacctatggtcagcatgtagcggtagaattgacagaggagaatcatcgtcaattctttattcctcgtggttttgctcatggttttgctgtattgagtgaaacagcagtgtttcaatataaatgtgataacttttatgctccacaacatgatggaggtatcagtatattagatgaatcacttggcatttgttggaaaattcctactggtaaggctatcttaagtgagaaggacactaagcatccactattgaaagattttgaatctccatttctgtatggagaggatttatataaatagcatataataataacgatatatgtaggtccctaatttcatgctacacacatgaatcccctacattttgcaggttgggaaaaatacagcggtatattcctgatctgtccccctcatattagcaaaatgctgatatgtattctaaatatatcaactgtctgtgaagatcgttgatatattgttttttaatagtatgcttgttgattaaaaataatattcagatttctagttttgtattatagaaaggattaggatattttttattgattatctattgtatttttgaaagaaaatgcatttctttgtggtatagataaaaagcaatttattatgttgactactgtagaatatttatccttgcttcgtgagtatatgcgaaagaattctgctaaatatggtatttctcgcatggggatatttggctccgttgctcgtggtgaacaacgtgagggtagtgatgtcgatatttgtgttgaaattgaaagaccttctatctttactttagttcatattaaagaagaattggaaaaactattgaaatgccctgttgatgtggttcggttgcggaataatatggatgaattattgagaggatgtatcaataaagatggaatttatgtgtaaaagtcagataatagaatcattgctaaagaaaactctccaaacggtggaaaggatattagcgaactcggaaactattacctctccttctttttatttattgactccgtctgggatggaaagattggagagtacttgtatgttattaatagctataggtgaaggagtgaaaggtgttgataaattaacagataaaaagttattatctttctatccagggatggattggaaaggagtaatgggaatgagggatataatcgcacatcattattttgatttagatgctgaaattgtttatgacgtgataaaacatgatttgccgaagttaaaagataagatgtgctacagcaaatcgtagatgatttgaaagtatctaattaagcgattgattaaatgtttttttatctcaaattcctaaaatacgcccgcactttccgcataatcttgattcccatcactacgccatcaaatacagccataccggtattgaacgaacgcatgattgcatctgccttattggttgccggagcaagcggggcgaatatttcgcgtgtagtagctgtcatgacctttttttgagcatggatctcatttaaaagcttctttttacgttcggcaatcttttctaatgtaaatttctgcggggtctgcgcattcataatttatttatttgaatcagttaaaaataaattagcgaggaagttcaccatcggagaaatgatgagctgcttgcggaaaataataaccagggcgatgagaacaacattgatgcctgctatgatggcgaaactcgacatcagaccgcccactaaaggctccaatatataagcaagagcaaaaagcagataaaacagggcaaccatgccaaggataataagtactaatatcataattaacgtggaaaaaagtatggttaacttctccgtcaattctaatttggtatattctttttgaagctccagatatttcttgaactcgaaaaacaactgctgaaaattctcaatacttttatcgtctgcaaacatggtcgctctgtttttagtctttggttactcacttattctgctatttctcccttcatctcggcagcgatctcgtcaacgagagtttccatttcactgcgattaagcttgattccttttttacgaagaatctctgcgattttatgacgggtatcttctcccttttcaggagcaaataaaataccaagggctgcacctacggctgcaccacccagaaaagctgctaaaacattcaatcctttcataatgtataatgtttaaaatgattatgatacaacaaatataacatttttatggaaaggttgttcgtgaaaactgaaattttttgctacgttttataattctttttttcttttatggtttaatcttatttaactgactttcgtagctaacctttgaaggttaaggcgtacttttgttttcgaatattgtaaatcaaaacataatggaagctaagattgtttttataactggcgccagtagcggaattggtgaggggtgtgcccgtaaatttgcgagggagggatggaatctgattctgaatgcccgtaccgtatcgaaactggaagaactgaaagctgaactggaaggggcgtatggtgtccgggtttatatattgccttttgatgtgcgcgaccggaaattggctgccgcctctttggaatcattacccgaagaatggaaggcgattgatgtgttggtgaacaacgccggactggtgatcggtgtggataaggaattcgagggtagcctggatgaatgggatatcatgatcgatacgaatataaggggactgttggctatgacgcgtttggtggtgcccggtatggtggaacgcggacgcggacatattattaatataggatctattgcgggggatgccgcttatccgggcggaagtgtgtattgcgcaacgaaagctgccgtgaaggctctttcggacggactccggattgatctggtggatactccattgagagtgacgaatgtcaaaccgggaatggtggagacaaactttacagtggtgcgttatcggggagataaggaagctgccgataatttttataaagggattcgtccgttgacgggagatgacattgcagaaacggtttattttgccgcgtcggctcctgcacatattcagattgcggaggtacttttgatgcctacttatcaggcaacaggcactatttcgtataagaagaagccggaatagacgttttttttgacggatttctttgccggatgataaaatttctattattttgttgcccgaaactaaatataatagacgagaatattgaattattaattaaaacagagtataggattatgaaaaaattagtcgtattaggaatgggagtatgcttggtgctagcatttgcatcttgtaaatccagcgaaagtgcctataagaaagcttacgaaaaagcaaaacagcaagaattggcagaaccgcaggtggaagctccggtagaggttactccggtggttgcagctcctgtgacaactactaaagtggcagatacatccggcgttcgtcaggaaaaggttacagtggtttccggtaacgaaggattgaaagattatagcgttgtagcaggtagctttggtgtgaaagcgaatgctgaaggcctgaaagattggttggacggacagggatatcactctacgattgcatttaatgctgataaggcaatgtatcgtgtgattgtgaactcttttgctgacaagactgctgctgctgaagctcgcgatgcattcaaggctaaatacccgaaccgttcggatttccagggtgcttggttgctgtatcgtgtatattgatttctttttggtaatatatattggaaagaacgaacgtttttttccgaataagaaggcggtaactgggaagttactgcttttttattgaaaatgagtggctttttcgtttagatatttttatctttctactaaaagaagttataaatgatagtggggaaacttttatagcaaagaaagtttttacttttgtcaactcttaatttggaggatgttttgcctgaatgtgaatagggcattaatttagagattgaatggaacaaaaatatgtaatggctgctatcgacgcggctctaaaagcaggtgaaaagattctttctatttataatgatccggcatcggactttgaaatagagaggaaagctgacaactctccgctaactatagcagacagaaaagcgcatgaagcgattgtggctattctgaacgatactccttttcctgttcttagtgaagaagggaagcatttagggtatgagatccgtcgaggatgggatactttatggattgtagatccgctggatggaacgaaggagtttattaagcgcaatggagaatttacggtaaatatcgctttggtgcagaactctgtacctgtattcggtattatttatgtgcctgttaaaaaagaactttatttcgggatcgaaggtgtaggggcttataaatgttccggtattgtcagtttggaagatgacggcgtggcattggaacaactgattgggaagtcggaacagatacctttgaaggaggtgcacgatcatctgatcgtggttgcttcccgttcgcacctgtcgcctgaaacggaatcatatattgcagatttgaagaagaaacacggcagtgtggagttgatttcgagcggaagttcaattaaaatctgtctggttgctgaaggtaaggctgatgtatatccgcgtttcgctccgacgatggagtgggatacggctgccgggcatgcgatagcccgtgctgcagggatggaagtatatcaggctggaaaggaagaacctctacgatataataaggaggatttattgaatccgtggtttatcgttgagccaaaaagagaacactaaataatgtttatatgacatttgaaattgtatttgtactattatccctattaggaatggtagcggctttgatagcagataagatgcgtccgggcatgatacttttttcggtagtggttttgtttctgtgtgccggcattctgactcctaaggagatgctggaagggtttagtaataaagggatgattaccgttgctctgctgtttctggtgagtgagggtattcgtcagtcgggcacattgggacaagtgattaagaagttgcttccgcaaggaaagacgacagtatttaaggcacagttgcgtatcttaccttcggtggcatttatttctgcctttctgaataatacgcctgttgtggttatttttgccccgattatcaagcattgggctaagtcggtgaatctcccggctacgaagtttctgattcctctttcttatgtgactattttgggaggtatctgtaccttgatcggtacttctaccaatctggtggtgcacggtatgatattggaggccggatttgaaggcttttctatgttcgagctcggaaaggtgggtatttttatagctattgccggtatcatttatatatttcttttctctaaacgtcttttgccggatgcacgtccggatacggctgtgccggatgaagaagtagaagaaggggagaagttgcatcgggtagaggctgttttgggtgcccgttttcccggtatcaataaaaaactgaaggattttaatttccagcgtcattacggtgcggaggtaaaagagattaaaacacgtaacggacaacgttttgtgtcgaatctggaggaagtggtacttcacgaaggggatacattggtggtgatggcggatgatacgtttattccgacatggggggaatcttctgtgtttgtcttgttgacgaatgggaatgagccggatactaccgggaagaagaagcgttggtttgctttgctgttgctggttctgatgattgtcggcgcaacggtgggtgagcttccgataacgaaggagatgtttccggatatcaaactggatatgtttttctttgtgtctattactactattattatggcatggacgaatctgttccctgcccgtaaatatactaaatatatttcgtgggatattctgattactattgcctgtgcttttgctatcagtaaggcaatggtgaactctggtgtggcggatagtgttgcgaagtttattatcgggttgagtgatgattacggcccgcatgtgttgcttgcaatggtatttattatcacgaacttgtttacggaattgataactaataatgcagcagcggctttggcgtttcctttggcactgtcaatctctgcccaattaggagtgagccctacgcctttctttgtggtgatctgtatggctgcatctgccagcttctcgacaccgatcggttatcagacaaatttgattgtgcaaggtatcggtaactataagtttacggattttgtacgtatcgggttgccgcttaatattatcactttcttaatctctattattctgatcccgttgatctggaacttttaaataaaattgtaaatggaagaaaagaaccatatatatccgatatttgaccgcatgatgacgcggcaggacaaagaagagcttttggggcaacacagtgtgatgatctggtttaccggattgagtggttccggaaagagcacgattgctatcgcattggaacgtgaacttcataagcgtggattgctttgccgtatcctggatggggataatatccgtagtggaattaataataacctgggattctccgaaacggaccgggtggaaaatatccgtcgcatagcggaagtgtcgaagttgtttctggatagtggtatcattacgattgctgcatttatcagccctaataatgatattcgcgaaatggctgcaaacattattggtaaggatgattttctggaggttttcgttagtactccgctggaggaatgtgagaaacgtgatgtgaaaggattgtatgcgaaggcacggaaaggggaaattcagaattttacaggaatttccgcacctttcgaggttcccgaacatccggctttgtcactggatacttccaaattgactttggaggagtcggtgaaccgtttgttggagcttgttttgccaaaagtgaagtgtataaaatgaaataaatatggaagaatataaattaagccacttgaaggagctcgaagccgagtctattcatatcatccgcgaggtggcggcggaatttgagaatccggtgatgctttacagtatcggaaaggattcctcggtgatggtacgcttggctgaaaaagcgttttatccgggtaaagtgccattcccgttgatgcatatcgattcgaaatggaagttcaaggagatgattcagtttcgtgatgaatatgcgaagaagtacggatggaatctgattgttgaaagtaatatggaggcttttcatgcaggggtaggaccttttacgcatggaagcaaggtgcatacggacttgatgaagacgcaggctttgcttcatgcgttggataagtataagtttgatgctgcatttggtggtgcccgtcgtgacgaggagaagtcacgtgcgaaggaacgtattttctctttccgggataagtttcaccaatgggacccgaagaatcagcgtcctgaattgtgggatatttataatgcccgcgtgcataagggggaaagtattcgtgtattcccgattagcaactggactgaattggatatttggcagtatattcgcttggagaatattccgatcgttccgttatattatgctaaggagcgtccggtaattaatttggatggcaatattattatggcggatgatgaccgtttgcctgaaaagtaccgtgaccagattgaaatgaagatggttcgttttcgtacgttgggctgttggcctctgacaggggcagtggaaagtggagctgctacgattgaagagattgtggaggaaatgatgactacaacgaagagtgaacgtactacccgtgtgattgactttgaccaggagggtagtatggaacaaaagaagcgtgagggatacttttaattgtaactagttatggcagataataaattagatataaaagcttttctggacaaggatgaacagaaagacttgttgagactgttgactgcgggttcggtagatgatggaaaatcaacgttgatcggacgcttgttgtttgacagtaagaaactgtatgaggatcagttggatgcactggagcgtgatagtaaacgtgtggggaatgcgggcgagcatattgactatgcgttattgctcgatggattgaaggctgaacgtgaacagggtattacgattgacgtggcttatcgctatttctcaacgaatggtcgtaagtttatcatcgcggatactccgggacacgaacagtatacccgtaatatgattaccgggggatctacggctaacttggctattatcttggtggatgctcgtaccggagtgattacccagactcgtcgccatactttcctggtgtctttgctaggaatcaagcatgtggtgttggctgtcaacaagatggacctggtgggtttctcggaagagcgttttaacgagattgtggctgactataagaagtttgttgctccattaggtattcctgacgtcaactgtattccactttctgcattggatggggataatgtggtggataagtctgaacgtactccgtggtacaaggggatttctttgctcgatttccttgaaacggttcatattgataatgaccataattttacggatttccgtttcccggttcagtatgtgcttcgtccgaatctggatttcagaggattctgtggtaaagttgcatccggtatcgttcgcaaaggggatacggtgatggcgcttccttccggaaaaacatctaaggtgaagagtatcgtgacttatgacggggaattggattatgctttcccaccgcagtctgtgaccttgacattggaggatgagatcgatgtgtcgcgcggcgaaatgttggtgcatcctgacaatctgccaacggtggatcgtaactttgatgctatgatggtctggatggatgaagaaccgatggatgtaaataagtcgttctttattaagcagactaccaatttgagtcgtacgcgtattgatacgataaagtataaggtggacgtgaatacgatggagcatctgtctctggagaatggtcagctgactaaagagacgttgcctttgcagttgaatcagattgcccgtgtggtgctgactacggctaaggaattgttctttgatccttataagaagaataaatcttgtggctcatttatcctgattgacccgatcactaataatacttcggcagtaggtatgattatcgaccgcgtggaaatgaaagatatgagtgacacggaggatattccggtattggatatggcaaaactgggaattgctccggaacattatgaagcggtagagaaagctgtgaaggaactggaacgtcagggccttgcagtgcgactaataaaatagattgttcaacaataaattgaaaactgaaaatgacagcattctgtcgtctttaatttttaattcttaatttctaattaataaagtgggattactcgaatttaataaacttccgattaatacattggtaggtgccgactggaagacattcaaggctatcaccgccgggcgtgaaattgacgcagcctacaaaggtaaataccgattgacgaaggctgtgtgccgattgctttctccactggcgtcattacaagacaggcgttacgagaagttgctggctaatcagccattggagcatgatccggtgttcattttgggacactggcggagtggaactacatttgtacataatgtgttctcttgtgacaagcattttgggtataacactacttatcagactgtatttcctcatctgatgatgtggggacagcctttcttcaaaaagaatatgagttggctgatgccggataaacgtccgacggataatatggaattggcagtggatcttccccaggaagaggagtttgctttgtcgaacatgatgccttatacatattataatttctggttcctgccgaaatatcagcaggagtatgccgataagtatcttttgtttgatgatataacggatgccgagttgaaggtgtttgaagaggtgttcacgaagttgattaagatctctttgtggaatacccgtggtactcaattccttagcaagaatcctccgcataccggcagggtgaaggagctggtgaaaatgttcccgaatgctaagtttatctacctgatgcgtaatccgtatactgtattcgaatctacacgcagtttctttaccaatacgattcagccgctgaaattgcaggatgtcagcaatgaacaattagaggaaaatatcctttctatctatgcaaaactttatcataagtatgaatcggataagaaatttattccggaaggtaacttgatggaagtgaagtttgaagattttgaagcggatgcgatgggaatgacggagaatatttatcagtctctttctatccccggatttgccgaagcacgtagtgatatagaaaaatatgtgggcggaaagaagggatataagaagaataaatataaatatgacgaccgtacgattcgtttggtagaagagaattgggattttgctttgaaacaatgggattataatttataagaagaaaaagaaaggaaaagtattgatgattcagaaaagcgttcatcgcctgttgatgacaggtttcgttgcatttatttcttccttgtctttgatggcgcaacataaagttgaaatgcttccttttggggacatggatcaatgggtggaccgtcagataaaggaatcgagcattatcggtgggaatacaaagaatgtatatgcgatagggccgacgacggtaattaagggagatcaggtttataagaatatgggcggatcgccttgggctacttcaaatgtgatggcgaaagttgccggtattacgaaaactaatacttcggtattcccggagaagcggggagatggatattgcgcccgtttggatacgcgcatggagagtgtgaaagtgttgggactggttaatattacggtgttggcggctggctctgtctttaccggttcggtgcatgagccgattaagggtactaaaaacccacagaaaatgttgcagaccggtattccgtttaccaaaaagccggtggctcttcagtttgactataaagtgaagatgtccgaccgggagaaccgtattcgcgctaccggtttcagcaagattacggatgttcccggaaaagattatccggcagctatcctgcttctgcaaaaacgttgggaagatgccaatggaaatgtgtatgcaaaacggatagggactatggtgacttattactatcattctacagactggaaaaataatgcgacttatgaaattatgtacggtgacatcacgaatcgtccggaatataagtcgcacatgatgcgtttgcaggcgactgaaagttatacggtgaacagtaagggtgaaagcgtgcctattcatgaagtggcctggggagatgaaaatgatgttccgactcatatgtgtcttcagttcacgtccagtcatggaggagcctatatcggttctccgggaaatacactgtggattgacaatgtaaaactggtatattaactaaagtatatagacaaagaatagaaatagtcagtgatctaatttcatcactgactattttttttgttttaattcttccacaacaaaccccttcagatgccttctgaagttatattacacttttatcgctctataaaattctatgaatgaatgaaaaattacgtgtttttttgtttgtgttatattaaatatctatatttgcactaattttagaagaaaggatgacgtttattgtctcttagtcaggtgtggaacatttgggttgtgtatctagcctgtaagacaattgaaatatattatttactaaaataaattgagatgaaaaagggtttattgtttattttattggcagcagtctctgtatgtctgcctgcacaagaaaaagaaaatgcagcaaagagttatagagtggaaacaaatcgctttggtgctaactggtttattagtggtggcgttggcgcacaaatgtattttggcgacaatgatggtaaagctgacttcggaaaacgtcttgctccggcacttgacattgctgtaggtaagtggtttactccgggtatcggattacgtgtagcttacaacgggcttcaggctaaaggtgctactcctaatgctaatggtccgcttgtagacggaggacagtattctaatggctactacaaagaaaagtggaatgtgatgaacttccatggagatgtaatgctgaatctttccaatatgatttgtggttatagagaagatcgtctgtattcattcattccttatgcaggagctggatttgtacattcaggaaaaggtgcaggttacgacgaactgggtatcaatgccggtttgatcaaccgtttccgtttgtcttctgctttggatcttaacgttgaattgcgtggacttttgatgaaaggcgcattcggcaattcaggtcctgaaggattggctggtctgactataggtgttacttacaagtttaagaaacgtggttgggatgctgttcctactgtaccaatggttccggaaagccagttgaacgacatgagagacagagtgaacgctttgaagggtgaaaacgaatctttgaaacgtgacttggttgaagctcgtaacaagaaacctgaagtgatcgttaagaaagaagctggattcgttccacgtctggttgttgtattcaatatcggaaagagcaacatcagcaagagagaatacatgaatattgaagctatggctaagggtatcaaagcaactgataaagtgtttactataacaggatatgctgataagggtactggttctgctgaatacaacatgaagttgagtaagaagagagctgaagctgttcgtgacctgatggttaatgaatttggtgttcctgcttctcaattgaaggttgattacaagggtggtgtaggcaacatgttctatgatgatgctaagttaagccgtgtagctattgttgaagaataatatacatttgaaataatagaataaaagagacgtttcctttcacgggaagcgtcttttttgtatttttgtaccccatgagcagaatagtagcaatagattatggaagaaagcgtaccggaatagctgtgagcgatacaatgcagctgatcgcaaacggattgacgacggtgcccacgcatgaacttctgaactttatcggtgaatatatagctaaagaaccggtggagcggattattattggattgcccaagcaaatgaataatgaggtttcggagaatatgaagaatatagagccttttgttcgttcgctgaaaaagcgttatccggaccttccggtcgaatatgtggacgaacgtttcacttctgttcttgcacaccgtaccatgctggaggcaggtttgaagaaaaaagaccgccaaaacaaggcattggtggacgaaataagtgctactattattttgcaaacatatttggagagtaaacgtttttagtataggacataagaataacttaattttttagtagagtataaaagtatgattttacctatttatgtatatggtcaacctgtattgagaaaggttgcagaggacataacaccggattatccgaatctgaaagagttgattgagaacatgttcgaaacaatggtacatgcggacggtgtaggattggctgctccacagattggtttgcctattcgcgtggttacgattacattggatccgctttcggaggaatatcctgaatttaaagactttaataaggcgtatatcaatccccacattctggaagtagggggtgaagaagtgagtatggaagagggatgcttaagccttcccggtattcacgaaacagtgaaaaggggtgataaaattcgcgtgaaatatatggacgagaattttgtggagcatgaagaagaggtggaaggttatctggctcgggtgatgcaacatgagttcgatcatttggatggtaagatgttcattgaccatatctcaccgcttcgtaagcagatgattaaaggaaagctgaatacgatgttgaagggaaaagcgcgcagttcatataagatgaaacaggtgaaataaagataaaaaacgtttatatccctgttaagtaagcgaaaagcattatttttgcttcgtttacaagcataaaatatcaatggtaaaaagaatcttaacagttttattactgttcccaacgctggtgtgtgctcaaataaatacggatcgggtgatgactattgcccgaaacgctctttattttgaggactatgtactttctattcagtattttaaccaggttattaacgctaagccttatctgtatgaaccttatttcttcagggcattggctaaactgaatctggaggattttcagggtgctgaagcagactgtgatgcagctatccaacgcaatccatttgtggtgggtgcttatcagattcgtggtttggcaaggattcgtcagagtaaatttgatggagcgattgaggattataagaaagcattgcattatgatccggagaatattactttatggcataacctgacattatctcatatccagaagaaggattataatgctgcgaaagaggatttggaaagcttgttgaaggtgtctccacgctatacccgtgcttatttgatgaggggggaagtgtctttacaacagaaagatacgattgctgccttgaatgacttcaataaggcgcttgagctggataaatatgatccggatgcttgggctgcaagagcgattgttaaattacaacaggctaagtatgcggaagcggaagcggatttcaaccgtgctattccgttgagtgctaagaatgctggaaattatataaaccgtgcattggctcgttttcatcagaataatttaagaggtgccatgagcgattatgatctggcattggatattgatccgaataactttatcggtcattataaccgcggtttgttacgtgcacaggtaggagatgataaccgggctatcgaagacttcgactttgttatcaagatggagccggataatatgatggctgtctttaaccgtggtttgctgcgtgcgcaaacgggtgattatcgcggggctatacaagattacacaactgttatcaatcagtatccgaacttcctggtcggatactatcagcgttcggaagctcgcagaaagattggagataagaagggtgcggagcaggatgaatttaaagtcatgaaggcgcagatcgacaagcagaacggtgtgacgaacaaagatgtagcacagaacaaggataaggaaaatgatgaggaaggcggagagaagacccgtaagaaatccgataagaatatgaataactatcgtaagatagtgattgcggatgattctgaagccgaacaacgctatacaagtgattatcgtggtcgtgtgcaggataagaatgtaaatataacgctggaaccgatgttcgctttgacttattatgagaagatgagtgacgtgaaacgttcggtgaacttccacaaatatattgaagacttgaaccgtacgggtatacttccgaaacgtcttcgtatcacaaatatggaagctccattgacggaagaacaggtgaaggtgcattttgccttgattgatacacacacatcggcgattgtggaagatgacaagaatgcttcgaaacgttttgcccgtgcgattgatttttatctggtgcaggacttctcgagtgcggtttctgatttgacccagacgatcttgctggatggtgatttcttcccggcatattttatgcgtgcattgattcgttgtaaacagttggaatatcagaaggctgaacaagctgtcgaaacagatgttgttcctggcgataataagcgtaaagagattaccgcggtagattatgaggtggtgagaaaagatttggataaggtgattaatctggctccggactttgtgtacgcatattataatcgtgctaatgtttctgccatgttgaaagattaccgtgccgcaattattgactacgataaggcgatcgagctaaatcctgattttgcggatgcttatttcaatcgtggactgactcacattttcttaggaaataataagctgggcatttcagatttgagtaaagccggtgagttggggattgtttctgcttataatgttatcaaacgttttacagatcaatcggaataacatttttttgataaaaaatagaaaactcaaaagatttagttacttttgcgttcaaattatgaaaatataacatcatcatattatgataaagataacatttcccgatggctccgttcgtgagtataacgaaggagtgaacggtttacagattgctgaaagtatcagctcgcgtctggcacaggaagtgctggcatgtggcgtgaacggcgagacttatgatttaggacgtcctattaatgaagatgctaatttcgttctttataaatgggatgatgaagaaggtaagcatgcattctggcatacaagtgcacacttgttggcggaagctttgcaggaactttatccgggtatccagtttggtatcggaccggctattgaaaacggattctactatgatgtggatccgggtgaagcggtaattaaagaaagcgaccttcctgccattgaagctaaaatgttggaactggctgcaaagaaagaagacgtagtcagaaaaagcatcgcaaaaacggatgctctgaaaatgtttggtgatcgtggcgaaacatataaatgtgaattgatttctgaactggaagacggacacattacgacttatacccagggtgcatttactgacctttgtcgtggtcctcacttgatgacgactgctccgatcaaggctattaagttgacttcagtggctggtgcttattggcgtggtcatgaagatcgtaagatgctgactcgtatttatggtatcacgttcccgaagaagaaaatgctggatgaatatctggtgttattggaagaagcgaagaagcgtgaccatcgtaagattggtaaggagatgcagttgtttatgttctccgaaactgtaggtaagggacttcctatgtggttgccgaaaggtactgcattgcgtctgcgtctgcaggagttcttacgtcgtatccagacacgttacgattatcaggaggtgattactccgccaatcggtaataagttgctgtatgtgacttcgggtcactatgcaaaatatggcaaggatgctttccaacctatccatactccggaagagggggaagagtatttcttgaaaccaatgaactgtcctcaccactgtgagatttacaaaaacttcccacgttcttataaagaccttccgttgcgtatagctgaatttggtacggtttgtcgttatgaacaaagtggagagttacatggtttaactcgtgttcgtagctttacgcaggatgatgcgcatatcttctgtcgtccggagcaggtgaaagatgagttccttcgtgtgatggatattatatctattgtgttccgttctatggatttccagaattttgaagcacagatatctttgcgtgataaagtgaaccgtgaaaagtatattggtagcgatgataactgggaaaaagcggaacaggctattatcgaggcttgtgcggagaagggcttgcctgctaagattgagtatggagaagctgctttttatggtcctaagcttgactttatggtgaaagacgctatcggtcgtcgttggcagctgggtactatccaggttgactacaacttgccggaacgctttgaacttgaatatatgggctctgataatcagaagcatcgtccggtgatgattcaccgtgctccgttcggatcaatggaacgttttgttgctgtattgattgagcacactgccggtaagttcccattgtggctgacaccggaacaggtagttattctgccgatcagtgagaagttcaatgaatatgcagaacaggtgaagatgtatctgaaaatacacgaaatccgtgcgattgtagatgatcgtaacgagaagatcggccgcaagattcgtgataatgaaatgaagcgcattccttatatgctgattgtcggtgaaaaagaggctgaaaatggtgaagtttctgttcgtagacaaggcgaaggtgacaaaggaaccatgaaatttgaagaatttgctaaaattttgaacgaagaagttcagaatatgataaataaatggtaactttgcagccgtttcaaaataaaatatttagtataacaataaaaagatcaaactaggaagtaaacgtttttaatgaagaatgacactctaaaagggcaatacagaatcaatgaacagattcgtgccaaggaagttcgcatagtaagcgatgatattgaaccgaaagtatatccaatctttcaggctctgaaaatggctgaagaaaaagaattggatttagtggaaatttctcctaatgctcaaccccctgtttgtcgtattattgattattctaaatttctttatcaattaaagaaacgtcagaaggaacagaaagcgaagcaggtgaaggttaatgtgaaggagattcgttttggtccccagacagatgaccatgattacaactttaagttgaaacatgctaaaggattcttggaagacggtgataaggtgaaggcttatgtattctttaaaggtcgttctatcctttttaaggaacaaggtgaagtattgttgcttcgttttgcgaatgatttggaagactatgcaaaagtggatcagatgccgatattggaaggtaagcgtatgactatccagctttctccgaagaagaaagaagctcctaaaaagcctgcaacggccggagcaccgaaacctgctgctcctgcacaaaaagcagagaagccggaaacgagcgaagaataagaaaaggatgcgtaacgcgcaggtatagtgcgttgccattatatatttaataatttaaaaacaagtaagatgccaaagatgaagactaactccggttctaaaaaaaggtttacccttaccggaacaggtaaaatcaaaagaaagcacgcttttcacagtcacattttgactaagaaatccaagaagagaaaaagaaatctgtgctactctacaactgttgatacaacaaatgtaagccaggttaaggaactcttagcaatgaagtaatcaaaagcgtaaaagtattattaaagtattaaccgaatgcattagcctgaagttcgctgcgtgaagtagcggcgctaacattcaaaaaaagtaaaactatgccaagatcagtaaatcatgttgcttcaaaagcaagaagaaagaaaattttgaaattgaccagaggttactttggtgcaagaaagaatgtatggaccgtagctaaaaacacttgggaaaagggtttgacttacgcgttccgtgaccgtagaaataagaaaagaaacttccgcgctctttggatacaacgtatcaacgctgctgcacgtcttgaaggaatgtcttattctaaattgatgggcggtctgcacaaagccggtattgaaataaaccgtaaggttttggctgatttagctatgaatcacccggaagctttcaaagctgtagttgctaaagctaaagctgcttaagcatcaatagtttacgagttacaaaggaggtgtgtcgtaatgcacgatgcacctctttttttgttcatcactatacaaatctgttcactttctttaagctgcgatcttttgaagatttctttgatttatgtgttcccagcatctaaaaacagcagttgtaagctcataaaacagtctaatcagccagttcatacccttttttgtcagttttgcacacatcttttttatattgaaggcaatggctaggaaggcaaagtccatgaagaccttgtcctttccaaaatgtcggaaacgtttgtagttcatattgtttttaatttgtccgaacacggcttccggttctatgcatctctgccctctgtgtttcagtcctttctcagagcagagcagttctttggctctccgcttgtattgtctaagcctatgattcagttctatcgtcctgtttccttttgctttaaaacagcggcatcgcaggggacagccttcacacctgacagctctgtaccgtgcattttcgttgacatatccggatgcggttttcacattcctggtgcctatcctccgcatcctttgccccatagggcagatgcagaagtcatgttcttcattgtagtagaagttttcggccttgaacgggtccggtttgaatctcggccgctgctccatgtggaaatagttgtactttacgtaggcttccatgccgttttcggacatgaagcggtaattctcttcggagccatagccggaatcagcaaccaccgtatgggccatccggtcatacctgtttgaaaaagattgcaggaaaggaatcagggtcagtgtatccgtagggttcgggaagagtgcaaaatcggtgatgaactgattttcggtgccgatttgaaggttgtaaccgggcttcgtctgtccgttgcgcatggcatcctccttcattctcataaaagtagcgtccttgtccgtcttggaataggaattcctctcttgcagcgtttccagatggcagtcgtattcctgcagtttgtccctgtgttcttccagttccttcaactgtttgcgtttctttttcagttcagtcttttcctctttcgcggatggctcggaaacctgttccagtgcatgacgcaattctcctgccatttcagtcagcatggccggagtgaacccaacctcctcattgttctctgatgacttctcccgggcaatgacatcgtctatctgccctaacaggacatgtatcttcttcatcaggcgttcacggttccgctcaaccgtttttcgccagacgaaagtgtacttgttggctttggattcgatctttgtcccgtcaatgtattccacattcaggctgatgaagcctttggaagagagaagaactacggtttgcgtaaacacctcgttgatttccttcttcacccggttgcggaaacggttgatggtaatgaaatccggtttctcatatccggccagccagatataatggatgtcacggtgaaggagcttttcaattttccggcaggagtagatgttgttcatataggcatacagaatgaccttgagcatcatcctggggtggtaagggctgcgcccgcattccttatacagctttctgaaactttcaagattcaagccctcaaccagggcgtcaaccatgcgcaccggatcgttttctgcaatatcctcatcaattctttgaggaaaaagaacggtttggttgggattgtaaggacgaaaatgtatctttgtcatagtgaaattcttatgcctaaagatacaaaatctttaggtaataacaaagccccagcttgtgaaagtcggggctttgtgcgtaaaaaacagaaggtgtgcattttgacacaccttcttttcttttgttaggcggataaaagggagtgaaaaaaatgttagtaggtaaacaaattccttttttttcttgttagtctcatagattcttattacatttgtgatacaaaaatattagccgtatcgactggatcgggaaactcttcaaattaatctgatgcaccgagaaagcttcgttcttcaatggcgggccacatccttcgggacagctttaagccggtggattacaaagagggcgagcgctcaaatcttgttctatcagagtttcatcacatcgtcgatgcggctttttttatatacttttctatgatattttatttctccggtacaggtaattctaagtggattgcaaatcagctttccaaagagcaaaaagaagagttggtttttattcccgatgcgctaaagaatgaagcattggagtttagtttgcaggcaggtgaaaagatcggttttgtatttcctatctattcgtgggctcctcctgaaatcgtacttaattttattcggcaactctctttaaaggggtataaaagacaatatttgttttttgtttgttcctgtggggatgataccgggcttacgcagcaggtgctggagaaggctttgagtcataaaggctggaagtgtcatgcaggcttttctgtgactatgcccaataattatgtattgcttcccggttttgacgtagataagaaagaattggaggagaaaaaactggcagatgctattccgactctcaatcaaataaatgcttcaataagtaggagagaggagttgtttctttgtcatgaagggagtattccttttattaagacgaggattatcaatcctttatttaatcgctttcagatgtctcccgggaatttttatactacggatgcttgtattggatgtaagcgttgtgagaagagttgtccggtagggaatattatgatgatgggcagaaagcctgtttgggggatggattgcacctcatgcctggcatgttatcatgtttgtccgcagcatgcggtgcaatatgggaaaagaacgaaagataaagagcagtatttcaatcctaattaatctactcgccaattaatctactcgtctttgattttaatgcagcaattggataagtcttcaatgatagccaggctttctactctgacgctttgctcctcaagttttttacgcccattttggaaggctttttcaataatgaatcccattcctaccaagtttgctccggattgcttgatgaggtcgataatgcctaatgcggcattgccatacgcgaggaagtcatccacgaaaagaacattgtcatttggagtgaggaaatcggcactgataacgacttcataatcacgatctttagtgaatgagtgcacagtggtgcttagtgcattctggatggttttaggagacttcttctttgcaaatacaactggtaaatccatcaggtagcctgtcatgatagcaggggcgatgccgctggcttcgattgtcataatcttatttacgtttgtggctgcaaaacggcggacaaactcaactccgattgatttcatcaggacagggtccatttgatgattaataaaaccgtctactttcaggatacctccttcgtagcactttccgtcttgcagaattctttttttaagtaattgcatgctgtatgatattaattaaataatgtgctaatattccattccgcatggtgaacagcggttggtatattagcacatggaaatttgaattgttacttgttgtctcttaagtcttttactcggacggcttttccttcgctttgcgggagagagcctttttttaccagtttaactttgggagtcaccaatatttcatcctttaattggcgggttatatccttgcggatcttctccagttcaatataattgtcagtggaaaggtcgcttaattctacttcgacgatcatctcgtcttggttgttgactgtttccagtgtaatcaggtaattgctgcctaattcgggaaattgtacgagtatcttttctacttgcatcgggaagatatttactcccttgataatgaacatatcatcactgcgtcccttgatacgatcaatacggatgtgcgtgcggccgcaggggcattttcccggaagaatacgggttaagtcacgggtgcgatagcggattaacggcatcatctcccggtcgagagtcgtaagtactaattctccgatttctccttcctgaacgggttctcctgtttccggatcgataatttctaccagataacagtcttcccagaagtgcattccgttttgttcctgacattcgaaagcaacaccgggaccgttcatttctgtcataccgaagctgttgtatgcttttacgcccagcatcttttctattttccggcgttgttcgtcggtgtgaggttcagcaccgataaccagcgttttcagtgtggttcctttgggatcaaggccttcttcctgaaagacttcggcaaggcggatggcatagctggggatagcatgtaaagcggtagtcttgaagtcgttgatgaatttaatctgtcgtttactgtttccggctgcggcagggactgtcagacagcccaggcgttctgcaccgtattggaagcctaaccctcctgtaaacataccgtatccggagctgttttggaagacgtcggtcttgcgtattcctactgcgtacaggcagcgggctaccaggttggcccaggagtcgagatcgtgctgtgaatgaacaataactgtcgggtttccggtagtaccactagaagagtgaatacgtacaccatcattgctcatatcacctgctaccagcccgaaaggatagtgggcacgcatatcggctttggtagtaaagggcaatttgcggatatcgtctaatgattgtatgctatctgcagtgatgccatgtttgctgaaaacttctttgtaatatggggagtttgcagctatattgattgttttcttaagccgtcgaagttgtaattcctgcaacttctcccggctcatggtttctagttcttcttcccagtattgtgtattcatgataatgcctgttattacattagcttttctgcaatttccttgccggcagccaatgctttaagattcatttctacaattgcttctcccttgcgcaggaagatttcacggatgctgtcttgtacttttccgtagtcgatgccaaggaatggaatggttgctcccagtaagactatgttggcaacgcgggcggagcctacttctttggctactttgtctacgttcaacacaattttgtgaggcagcttattgatttctgccattactttgtctgcttccggataattggggatattgacaaacggagtttcgttagtcactaaccaaccgttagggctaagataagggaggtagcgcaatccttccatgggttccaatgaaatgataaggtcgcatttacctgatgggatcaagtctgaagcaatcggctggtcgctgatacggaggttggattgaacatctcctccgcgttggctcattccgtgcacttctgcttgtttcatatataatccttctttcaaggcagctttgccgatcactgtagcaatagacagaattccctgtccaccgactcctgataatataatgtctttcttcatggcttacttacttctttttttgcgtgctaatgtctggatacactctctacgtggaataatgacagatacaccacggtattcgatctcttcgcgaatgatttgcttcatctcctcatagtttttcttcaacggagtaacgacgcggatatgagccggatctactccgatacctgcacagatcgcttcgatacgtccggttccggcagagtcctgtccgcctgtcatggcggtagtttcattgtcggagatgacgatggttacactggcattctcgttcacacaatctaatagtccggtcattccggaatgggtgaatgtggagtctccgatgacagctacagccgggaaaagacctccgtcagccgcacctttcgccatcgtgatggaggcgcccatgtctacgcatgagttgattgcattgaaaggagcattcgcgcctaatgtgtaacagccgatgtcgctgaatactttatgagatgggtattcttctttcagaacttcggttagtgtgatatacatatcgcgatgtccgcaaccttcgcaaagtgcaggcggacgcatttctacgacagaaggaatgccgaattccgatttattctctttgcctacggcgcgggctacagagtccggatttaattctccatcctgtgacagagtgccgtccaagcgtccttttactttaacgccgatgcccagataacctttcaattgtttttctacaaatggttgtccgtcttccagaacgaggatttcgtcacaggagtcaatcaattgatgtaattgctttttaggcaatggatactggccgattttaagtaccggatattcgcaaccttcaggatagttttccatcagatagttgtagccgatgccacaagcgataattcctaactttttgttaggaccatctgtatatttattataaggtgattcttccgaagctttgataaactcgtcttggcgcgcaagtaatactttgtagcgtttacgggcatttccaggtaacaagatgaactgacgaggatcttcgctgaaagagatgccattctgtggtttttgtgctttgcgttctactccagagcgggagtgtgcaaggcgggttaccatacgcatcaagataggttcgcccaatttttcagagaattcgaaaccactgtataccatatcatacgcttcctgctgattgctgggttcgtacatgggaatcagtgagaaatctccgtagaaacggctgtcttgttcgttctgcgaagagtgcatactggggtcgtctgctgctatcacgatcaatccacctttcacgcctgtgatggcagagttgacaaaacagtcggcagctacattcatacctacgtgcttcatacaaactaatgcccgtttaccaacgaatgacatacccaacgcagcttccatcgctgttttttcattggcacaccaacggttgtgtatattctgttcggtcgttattggggccatttgaatatattccgtaatttcagttgaaggagtaccaggataggcataaacacctgaaagtccggcatccagtgcagcttgtgcaatggcttcatcgccaagtaagagttgcttgctcatatatatttcttttatttagtgttgatcacagtttgttaatctatcgggcaaagataggcttttccgttcgttttatcacaaatttacttgaaaatctttctttcattcagggctttccagtattttcttgcatttgccatgtggtcggcataattggatgcaaagttgtgagttccggaaaaatcttctttagcacacatgtagatatagttatgtttggtatagttcaatacgctgtctattccctttttagaagggatacggatggggcctggaggcagaccggtatttatataggtgttatagggggaattgacttttaaattttcgttggtgattcggcgcagaccgaaatcctgtagtgcaaatttgatggtaggatctgcctgcaaaggcatatcttgatgtaaacggttgatatacaatccggctaccattggcttttcttcattgttgttggtttcttcttcaacgatggaagcaagagtgctgacttcttccggtgtcatgccgatagcggtggcttgtgccagacgttctttgttccagaagcgttcgtgctcattcttcattcgtttaaagaagtcgtctacgctcatatcccaatatacctgataggtttcaggtatgaaaaggctggggagtgttatggttgtgtatcccatttgagcctggaaagtagagtcgaataactggctggcgatttcggcagagtctatcatgagttgttttccaatgcttcgtgctaaccggtctaatgtccggacacttcctatggtaaggttgatcgcttcctgatagcctctggaaaagcgactatatacgtgatagatattgtcatttgggcgaatggcataacgtccggtatggatattctgatcgaaatctttatattttgccatccactggaatccggtgaacttattgacatgcccgaatttttgtattttatgatagatagagtcggctgtgtcatcccggtctacataaatatatacagttttagatggatgaaattgaggagcaaacagatagtaataaaaggtgcctccggcaattgcacaaaggaggaatgctccgattagaattgatagtagaatatttctcttttttctcttcatcttttgaggtatatttaaaaagttcgccaaagataaaaagaatttggataggattgttctctttttaggatgaatcataagaagactatatcaaaagtatgttttctttcgatgcggtaatgaatccattctttcacgttgcgtttgccttgcttgatttattcagttgcttattgtgctgcttggcattcattgcaattatctttttgtttccagcgtagttccattattccaatatattgtgggactattttctcgcaatatatgggaatgttttctcataaaataagagaatactttcccacaatatgtgggaataagacaatctcttgacgttacaatgtgaaaccttgagagtaatacaacaactcccttttattgaagtgcaagtctgtttgtaactagaatgccattggcatagggaaatgaattcatttcagagaaacgagttttgctacttagttcggccagagggaataatttgcatttgcttctattttgttttctatctcatcgggtaaaggtgcgaagaaatccatattagtcaggctctcgatgctatccactgtgactacatatgaagatagaggttctactgcctgctcattgttgaataagaagccgatagcccgtatcggtttggcaaaaggagataggactactttgaaaaaccgttgaggtactacgaccttatttttcccaatcgttttaggctgtttttcaataataggtccacatataataataatggcactatctgctatagcccaattccggattttttcttccagatttttccatcctcttctatttaactggggatgttggggacacatattgctgaaatagaatgattctttcatggcttcaggactccatttcatatctgcagcaggcgccatgtgtcctttgtcgtatcctgaacgggtgtagtcagtattggttgcaatcgggcctgtcactaatgggtcggcaataaaacgattgcctcttttttcttttcctttggtttcttcccgggttaattcgtaagagacccagttgggtatttttaaatctttgttatatgatacggtatatccgctatgccggattatttgttcttgccggggaactaatggtatgggtgtctccagatctttgccaagtggaatttgaagggagatatcggtttgcggttcattattattctgggtattaatctgttggcaatataaatagacgccaaaaagaataggaatgagcacaatgatggcgatgatacatcctaatctgttattggaatgtgatttctttttgaatagctttctgtttttaccttttttacttcgattcattggttagctagtaatggcgggtttgttttattcttcttttctcatgctgaattcacaaccgcaatattgttggttgtagaagttatactctttaataatggcgatacgtcgttcgctaagtccgcctttccgccaattctgttcccagtatgtgacatccgggtatgaagcggtggcatattgtccggcttcattaatctgctccagacttttccaacgactggaagcaagcgttgtggttattacggaaaggccatgttcatgcgcataacgggcggtctccaataagcgtagtttaaagcaacgtaggcagcgtcctcctctttcgggttcctgctccattcctgctatatggcatcgccagttttcatgatcgtaatcagcatctattatctccaatcccaatgattgggcatagcgtgtacattcgtcttttcttatcatatactcttccagcggatagatgttaggattgcaataatagataacaggggtgatgtgatgttgcatcatacattcaataatggctgatgaacaaggagcacaacaggtatgaagtaagactttatcggctcctcccggaacttcgagttggaatttctttttcatgctgtaaagttaatacatatttacgatacgagtcaatggtttatgctttattcagaatagttttttataaaaataggagggaggatatctcctttatactgttttttataaaatcttgtttattgaactaattcactaaatgagtatgaattaactaattaatctcatcttttttactatttttgtccattcaagtttataacaactcaataatgaatgaattaaattgcgggcaaggagagcaaaatgcaggcccggagaagaaaaaaagtacctcgaaaatagtgaagagaactttagttgtggctgcattggctttggcggtatatgttgtatattccgtagtttatttatttgtctcacctgatcgtaatattcagcagatctatctggttccggaagatgcggcatttattattcagtcatcggctccgattgaagattgggagaagtttagtggaagcgagacgtggcaatgcctgaagaaagcgaaatcttttgaggaggtgacgaaaagtgtggagaagctggattccgttgttaaaagcaataaggtattattgtcgcttgtcggtgaacgggatatgcttatttcgcttcataagactcgtgccacagagtgggattttttgcttatcttggatatgcagaagacatcaaagatggacttattgaaagaccaggttgaaaccgtattggttatgagtggttttactgtgactaatcggatgcataatagcattaatatccttgaaatgcgcgattccgagacgagggatattttctatattgcttttgtcgataatcatttggttggttcatacacatccggacttgtcgagtcggctattgattcgcgtaataaacctaaaatcgggcttgatcagtcttttattgaaacagagaagttggtttccggtaagggacttgtcagagtctttgtcaattatgcgcgtgtacctcaatttatgtctatttatttaggtacaagaaatgagtacattgatctgtttagcaattccatgaattttgccggactttatttaaatacgaataaggagcggatggaagtgaaaggatatacattgaaaaaagattctgccgatccttatgtcactgctttgttgaattcgggaaaacataaaatgaaagcacatgagattctgtccgggcggacagctctttatacgaatataggtttcaatagtccggtgacctttgtaaaggaactggagaatgcactgtcggttcacaataaacagttgtatgattcttatcaaagttcccggaaaaagatagaagggttattcggtatatctttggaagaaaactttttgagttggatgtcaggagagtttgctattacccaatccgaaccaggtttgttaggacatgatcccgaactgattctggctatcagggctaaaagtattaaagatgcccgtaagaacatggaattcattgaaaagaagattaagcgacgtactccagttaagattaagactgctaactcgctctaaattggactttgattgaaaatcaagaagttgggcgtttgcctatattatataggtaacaatatggaaacgagcggacttctgctcgtttctgtattttgcaatatgcaaagaacgcctcaattcgagggcaaagatacgatatttttcttaatatcccataatttgcaagaagagaaacatagaaattaggacttttttacatgaaatctcaaacttgtgaacataaccccatcataaaatgaatagcaagtattcctgctgagtttatcaaataagggccgttgttgatgacgactctaccatcagctcatatataccttttcgacacaagcatatcttgttttcgtttgtactccgagtgtgtacagtttcaaaccatgatttacattcttatataagaaagtgaagccgtgaccatttgtgtatttttgccaaactaactccagtacatacaacagatgtaaaagatttctgcaaaatcgaccaaaatcataagaaaaaacaccaaatcagcaaatttcttaaagattatatccgtttattaagattatttttgtatatttgcagcattagtttggtggtaaagcctattggcctgccacgtgacaataggactttacggagcaagcctatatcacaattcttctccgtagtaacagtccgttctctctcactggtctctccctgcgcggcagaggcatacgtttttatatttttcaaacactccaaattgacagcgcatgatagatcaaagtcgccaacttaaaatctctggagctgaaaaaatcaccgataaggtaatagaaaaaggactctaaaaataataatacaaaagataataaataatggatacgatacctctatggtgcataatatttattaattgcataacgctcttgagtagtgtatggatacttatatatttatacagaaataggagtaaaaaaagtttttccacatatatatatggaatagcttcattgataggactgttcttaggtgtgataagttttttttattacatctgtcatgcattttgtgcaatattatttggtatagaaatattcattgatacatatatggaacagaaaaagagtcctgttaataggacttatttcaaaataacaattcctcatccttcagttcttaagggctactatggcggtattggttttatgttctatgggataatggtgatattatattacatgatataagcaaaaatatgttcaacagttgcaggttatcaaggataaaatttaaatagaaactttagaaatgtaaatggaagtaaaaacaaacctttataatgctctttattatcataacgcttcggtatttttttaccgaggtgttatgataatattgctgttactgatattagggtgttctgattctaataaggtagccaaagaaacaaatgtaagcattgatgtcattaataaggtaggatttaagagtgtatttgcaaaaaatggcatatttgttaaacttgtacctgcagaagataactcctattcacttcaggtaagtattacaaattatattgatactcttgattactatttaaatagcaagacaaagcaacagtctgtaccaaaaattttatttggtactgattatgtatttttccttacgggttcttcaagctacaggtatataacattgtcatatttagataagcgatttaataaaattataactcataaatatacaacaagcagagatgtgtcatcggatatcgatggagctatttttttcaaagaaggatactactattggtatgattttaaaaaacatgtgcttcattgtatgcgttctaatttaaatatgagctcatttaatggagctattttgtttagtggtgatagtattttaataaaagaaggatgtgaaataaaaaaatacaaagagagagatttttctcaaaaaagcagtttattgactcccactattattagatagttgagattagctgtgttcaaatttttacttcctactaatagaaatccgtggataagaaattaacctatccacggatttttatttgtaacgttgttttttactttctctttttcaacacatagaacctggcgatttcaccttctggttcattaccaaacgaatctatcagaacaatacggttgccatccctcaccttataaaagatgttgtcaccgcttgaaggacgaacaagcatcaggatgttgtagtcaagcacttggaaagttcctcttaacctttcctgtttgttctacttttcattgtatgactgtatcaacaaataggtaccatcagcatttaatgtgagtgtcgtttcaacattaggtggtaacacaccgcaatatgtcccagccacggaatccaaactggatctgttttataaagcatatcattcgattttaattgaaatatatgcatgtcgccaagttttctatgattatttaaatatagcgtaatacgtataaaaccattgaaagatcagtattttgaggtaatgcagcaattctatgcaataaaatcaaatgtcaatcgttctttagataaaacataaaataaagacgtatgaaagtatcagcaaaacaaggcaaatactttagaggaggaaaggtacaaaaatctttccttctcggattctgtatatttgcatttgttttgtttagggtattttggtatagaactttttatattatcaatgaagtagagttcactgtttggaaaacatataagggatgctatataacaccttataaatattggggagtattaccgccaaaagataattatcttagaatttccaatataggcatagctgatatttttatttgtaaagataaaacactatgtgtttttattgatccacagtcagatggtgcgacggaaactgtatgcaaattaaaatcatgtcaatactattcctatagtacggatgataaagaagtactaaaaagaagtaaagattgggtagaagaatggaaaaaatatcagtcgatatatccatatataactattgatgcaagagtcatgaaaattgaaattaatgaatgagagggagggtaaatgtgccccccttctaacactcaaaaatacgctttatgaaaattgttactttttgtatatatataactatttgttttctaattattggttgcaaaaaaagtacttcgactattagagacaacgcctatgattctgtggaaaaatatgaaacagaattagaaaaattatgcttagaatcgcataatggttctgtaacatattcaataagaataaaaacagaagacttaactaatgattatgagtacaagtatttaggttcattaaaaattaagaaaaataaatttaaagtaatacaacaaaaaatattgtcaggtcagtatcaaaattcacaaagagcggcagtttctataagattgttcttaaagggaaaattatatggagaatttaccggattgaacaacttttacaagattaaaattacatcaaatactctttgtttatataattatgaaacaaaaagtaggtctatatttgaactaaaggattctataccaaatctattgtttttcccttataatgataaagacagtttatcaagtggagacattttttattttaataggtgtcaataatttgtgtgattacgagaatagatgataatatagttatagttgtatgaaaacataattctttggattaccacatggatttttctatttaaaagatgttgaatctatcactattttaataacttgttagaaaagccataaagtttatgcaggtaagattactcacaataaaatcagaaataggaactttctaaaacggattttatcgtgagtgctttttcttcaatacagagagtaaaataactttgtcagactaccgttctatagttaacactcttatttccactcccaatttatcctttcttcttcagaatatagtttttcctaacctctttttggggttcgttaccgaacgagtctatcagaataatacagttgccatccctcaccttatagaatatgttgtcaccactcgaaggatgtacaagcatcaagatgttgccgtcaagtatttggaaagtgccttttaacctttcctgtccgttctgcttttctttgaatgtccgtatcaacaagtaggcaccatcagcatttaacgtgagagttgtttccacattcggcggtaatataccgcaatatgttcctacaaccaaatccaaatcaatcttgttgcttaaagctgccgtatattcttcgatttttatggaatcaataccagcatcattttgttcagtaccgcagaaaatataagatgtgacaaatgcgataccccaaaccgctataattaccattttctttttcatagccgtcataaaagaaagagtgtccgcaatgtctaacgagtggcatcacggacacggatgaatagttgagagtttaatgaaagttagtatgctgaaacattgttgatgcacggacaagcccttgcgctatcgaatacgatgcgaatgccgttagttttaatcttgtcgaagcgaaggatgcgcttgtacccgttggtcgttgtctattatttctgattaattttctttttaatttcattcgcctctttaaataggctattagccatgctatctttaattgctgccatctgtatcatttcgttatggtagcgaattgagtcctcgtaaatatttacacgagttctcactttctcaataacttctttatttgggcatacagaaaaattcttttcgatgtatcgaacattggggtcgtcggatggaagcaccatcttcaaagcccgatacttcaaatctgccacctcccaatcttggcgctctcgccattgggtgagattgccccaaatggagagaacaagagatagagccaagccaccaatgaaaagaagaacatactttgaagttggctcgaagcgatgagtcacaactttcttcagaggtgtattacccattgcgtgaagtttgtcctgcacattttttgaagtggcattcagctcttgtttcacctgattaattgcatcaaacaagagtttacttcgctgttcatctttgcttgcttctttcttggtaaggtcggtaaagatgcagatagcctctcttaatcttgccaatttgtcaatagcctccccttcttttactataacggaaaggatggctttttcaagtttgcttgtgtcaatacttgcagggctgagaactgtttccgctcctgcgttcttaggtgaggcagaaagttcatcaactttctgctccaatctctcaactgtgccgtagatggcttccaacatttcttctttcatatttcttttgttgtttgaatggtttgtaacttgcatcaaaggctaaagcctcttctgcgtttcttcttttttttcttggctgattcatcctccgggaatggctcaaaggtctgagcgttggcaggaacaaaaagtcctatggaagaaatgccgttccatgggtcttgacagctctccgatatggatggctcctggttgttcttgtgattgccttgctcgtattgctgagcagagttggcacttgctgataaaaggttctccgttccctctaatctcgcattcagtttgccaaaactatagtctcggctaatctgcgtacccttgaagctatatccatccttgcagaaacggatgccttgaaccttggttcgctccttatccttatagacaaactctaagtgaacacctcgttttgcaagttcacttttgaactcgtcccagctatctgccattctcaatgcgctctttacagcattgtgaatctcatatttggctcgctcagcattgcgtaacttgcgagtattagtattgctcttgtccgttccgtaggtaaatccatacttggatttaagagccttggtcacttgctcattacgtctgtaatcattcctgtctgatatgagcttgcccgcgttattgatgcggttgtacacgatatggcaatgtggtttgtccgtgttgtgatgccttacgatgatgaattgggtatcggtgatacccatcatctgcatgtattcaagggctatcttagccatgaactcatccgtcaaacgtggcttgtcctctggtttgaaactcaatgcaatgtgtcccacaggcttcttaatccttggatttagttgcctctgtagctcgaaactttgtactatctcggcattcgtgccgagtaacacaccatccgaggcgatgattttcgcctcgtccttgcctgtcacatagcggatgcagccagcaaaagagctgcccttctttagcttgcctatcatgtggtatcctcctttctgcccatactgcttggcttcggtttataacttgcttggcgatactcgccaaggatttctttcaatcttctcaacaagtccaccacatatacatgggtctcatggaagcctctctgatgcgacagcttggtaagttggttgaggttgttcgccatgccaatgagattcttggcgatggctaccgtctctgcattgtgtccgctcaccacctcgccgttcaaggctgattcacggatatactccgccaacttgcggttggcttttcttgccctcagtttcaatgcctcatagcttggctttgagaacttcaccgtgacagacttcgacagcttgcgaaccctgcctgtgggcggtcttccgccctttttcctattctgttcctgtatgtttgtcattcgatatactgtttacagttggtacactcactttctgcgaccgttgggagcaaaattcctccgccctcatggtggagcgaggcgttttgggattcccaaaacataacctcgctccctctcagaacacgttagttgtaattacagcctttcagctatccacgtccaaggtcgcagaccttaattctcacaatttgcgccaagcctcgaagtcctcttcataaaggcttaggtggtggcgcacgatgttctcgatgatgcccgatacgctcatgcgtctccctccgaggatgcggacgacacgatcaagacggtctcgtacatcggaactgacgaagactggcttgcggtcgtcaatccttggaacttggaggaaggtttgctgatactcctctaatgtcgccttgcgctgcttgccactgatgcgcttctgcggattcggtggcgattgagcctcgttcgttgatgtttcctctctatagggagttgttgcagcaactttctctacaattgctctcaactctgggttctctacatcatcataatcatcatagagagaattacaactacttggattggctttgttgccatacgtagatggtttaacaaaatccaaatactctttttccatcagctccttttgctcaggagtcaagactgcatcttttgttcttgccatagcttatgctgttttatttgttagtatagtggtcacggtttgcaccattgaccgattgtcgggtgcaaagtaagtgtactgagtgcatccatgcaactgattgggtgtaacatggcaatttagttgtggcttgcttatttgcataccgagatagttgtgagaacttcaacgtatttctcaactcatcattgttcatgtattcgttgcagtcgtgcaagtttttcttgttgtttttggcgttgaagtcggcaaaccccggcaacatactgccacagaaattgaaaacgcttgtttttagattgccgtgccttatctttgcactcacaagcgtggagcacagcatatgcgtggagctttgcgacataaacatagtattaacttagaaaaaagaaaagtatgggattcttcgtattcgaggaagaggcattcaactatcttgatgcccagttggagaacttcgtgaagcgcatggacagaatccgtgagcgcagtgaggacaagaccatgaacaagtggctcgacacgcaggacgtgtgtcagacactcaacatctgcccacggacagtacagacgcttcgggacaacggaactttggcttatacgcaaatcagccacaagacttactacaagccggaggacgtgatggctatcgtagcagtagtggaggacaagaaaaaggacatgcgctttcgcaggcgcacaggttaggctgtcaatatacaacagccacttaatccaaagcagcaagtaaaccgagtaacgtaagtatcaacaataaaacgagacaactatgagcaatgaagtaatgacaagaaacagcgagtggatgaaccacatcgtgaaccacctcaaccgaatggttgacaattttgaacgtgccgtgatgaactaccgccccatgcttgacggtgagcgcttcatgacggacaaggagctttgcgccaggctgcaactgagccgaagaaccctgcaggactaccgaaacaacggtgtcatcccgtatatccagcttggcggaaagatactctaccgcgagtccgacattcagaagattctgatggctaactatcgtgaagcgtacagaatgaaaggtgtgtaggagaaatacatgtccttgatgagtggggtgaaatgaacaaggcgacaacgtataacttaccgagcgtggctgttataggttgtcgcctcgttttattggctataccgagttggtcgtgtttgccgagtgttctccgtatggtctgtataaaatctaataccatgctaaaacacactgcggtggttcgcctaagtggctggaggcgcaaagcctccaaggaacgttgctttatggcaggtctatgccattgcattctctgtaaagatacagaccagtttagtgcggcttgtctgtctgccgatgacggactgcatgatgaactcccggaaggctctgctctcaatgctgtcaatacggaaggctaccgcaatgacgagttcaaggctatacacatcatagctgatgcggtcgttcttcctgacatgacgacgcacaccctgctctttcagaatgccgtccttgaatacagtcttgacagccttgcgcacatagcagccgaacacattgtacatgtcggcaatctcctgcatggtcatccatacagtatcggtcggcatggataccgttccgctctcgctgattgttataactcctctgttcattttccaatagttttttcgttcgacaatctgttcctttctcgcttggcaataagcttatccatgtcatttgaaatcttctgctccgtaacctgcgcatagacctgtgtgcttgtgatgtctgcgtgtcccatcatcttggctatgctgccgatgggaatgtcctcgttgagcatcaagactccgaatgtatggcggctggcgtggaatcccaacttattacttatgccaagcaccattccaagggtatgcacatcaagatagatgtctttcttctcacccagtggaaaaacaggcttgctgtcatccgtggtattgtagagcgaaagaatcttctcggctatcggatggagtggcacgaagaactccacgcctgtcttctctctttccttgcggatgaacttcctaccctcggagttctcactgatatggtgagggtacagtttctttacatctatataggataaggaggtgagcgaggcaaaaatgaaacatctgcgtgcaagctccgttcgctcgtcagccatcggggtagagagcatcttgatgaagtctgccttgctgatatgggtcatcttcggggctgccttcttctcataccctatcttggctatgggattgaagcggataatgctcctgtccactgccttgtacatcaacatgttcagccagagaaggcaatggttcacgtagctgtcgatacgtccctggtctcgtttcaggaatagcttgtattcctccccgaaattctcgtctatgtcctcaaaggcgatgtcgtccttatccaacaaatggacaaaggctctcagattcttctgccatgtccgcttgtgcagaaaggtttgtctggcttttgaggttcgataccattccacgatggtatcaccaaagctcagcaagaactttcctgtcgtgtccttgtccttcaacactgccttcagcatttccacggtgatgatgccgttggtggaaagaagtgagttgtatttatccttgacctcagcaaggaaacttgccaatcgtccgttgtcccttgcgttccgtacctctcccttcttggcgttccactcctgtggggtacaggatatgcctgtggaaatggctgcgcttttgccgtcaacggtgatgcggcaaagtatgttggctgttccgtctgccttcaccttctgtctgttgatgtaaggcaaaattgaaaatgtacttctgctcatagttgttgtccttataatataataatgtagttgaaactgtaaaaagaaaagttgaaagccttgttcataatgcgagaacaaagtccttctcggttgcagcgatgaacttgtccatgtcctcaaacagcttcttttgggttactctcgcataccgctgcgtcatcttcacatccttgtgaccgagcatcttgcagatggtctccatcggcacaccagcctccagcgtaatgaggctggcgaacgagtgtcgtcccgaatggtaggaataggtcttgctcgtttccgccagcttgcagatggtgatgagatcgatacgaacacgattcgtgctcagcaatgggaaaagggtatctcttgccccgtcctcgtatttcgccatcagctccaacgcctcgggcaggagtttcaccctggcaagtgttccggtcttcttgcggttatagatgagccatttgtcaccatcctccaacaccttgacattggctttcgtgatggaaacggtgtctatgaaagctgttcctgcatagcaggcgaaaagaaacatgtcacggctaacggatagtctcggcttgtcttcgggcagttccacatcacggatttttatgaaatcagacatgctgagagccttgggtgtcgtaacctttggagtgccaacccgataatgggcgaacagcaggttcttgcacaagcctcgctcaaaggcgatgcggcacatcttcttgaagagcgacacatagatggtgatggttcctgatgaaaagcctttctcgtcaagcaggtaatggtgaaagtcactgatgaaaggctcggtcagctgtccgaaagccaaatcagtcaacctatacttctccccgatgaactcagcgagattcttgcgaatctttctgtaagtccagacactgctcttcgacatatcgatgccctcatgggtgctgagttcgctgatatgctcgtccacgaaggagagaagggtggtctgtgtcttgacgctgccctgcaaagcctccttgacatccttagcctcgaagtccgttctcttttccacaagcacatcgaaagccttttggatggaaagcaacaactgcccgatgtccttgttggtctccacggcttccttgcttttgccctccaatcggctggcacgaggattccaaagcgatggagtgcaagacaacttgcaggagaactgcgccatagtcctgttcaccgtgatgcgtcccatgatgggagcttttccattcttgtccattccgctcttttttaggtagagcaacaccttgaatttttcgattttcataacgcttacattttgagtgtgcaaatataatcattttgtaagcgttccttgatacgcaaaacattgagaatcaacgcaataaaatccgttgatgcacaaagttgcctttccgcattgttacctgctttgcataggtaactgtggctcacgatttagtaactgaactacttcaatattcctcactcgcttgctttatgccgatttggcaactttgtgcaaatctgctcattcccaactgtttacgttccaacctctcttattctcctttggctgctttagagctttatgttaaaaatcctaattataaggatttcgagattaattatgtcgaaatgaaaggcttttttcgcttgttctttggaaagctatttgataaatttgagaagccatactatacttatgttgacgattatgtagtttttagtaataaagctgcttctttactttcctttgtagaagattacgagcagaagaatttattaaaaaataatccgggttttgaaaatgcactgtcatatttaaaatcaagttctactattttcttatatacagatgtgcgcaagttttattcccagttgaaaccgatgatgaatcctgctacatggaatgaaatacaatcaaacaaagacgttttgtattcatttccttactggactatgcagattataggagaggatcagtcggcttctttgcagtatgtgatggattatagcccatatcaactggaagaggttgacgttgctattgctaccgatgaagatgataaggaaatgaacgaagatgcagagaccgaaaaagagcagatgagcgaactgaaacgtttctatatcgaaaagtttgaaggaaacgttttacgggagttttatccggagggagcattgaagagtgaagcggaagtaaaagaagggaaacgccatggtcgttaccgcgaatattatgaagatgggacattgaaacttcgtggaaagtatgcaaataataaaccgaagggtacatggaagtactataccgaggacggaaaatttgaacgcaaagaaaagttttagataacgtcaacaaaagttgatttaaaagttaagctcaaaaaataatcggattctttttgttttctcaaataaagctgtaattttgcacgccgtaaacgagagacaaacgccgctatagctcagttggtagagcaacgcattcgtaacgcgtaggtcgccagttcaagtctggctagcggctctcaaattagaacgctgattattaattaataatcagcgttctaatttttacaggattccctattcttattttaaaagggaaatcctgcgtatgtaatagatgtgaaatataaaaatgtaatctatgttgagtcgtattattgttttagtggttgccggagtagccgtagtctatatcgttcgctttatagataactttttctcccaacgtagaagataaaactagctttcaaacattctgctgcgtgcgagcatacaagcgccaacgatgccggctttgtctttcagcttagatgtgatgatggctgaatctttattaaccagatttagagagtacttgcgtacggctgtttttatgggttgggtgatataatcgccggttaaagataaagttccacctataatgaccagttccgggttgaagatattgattagcccggcaatctgtttgcctagtttctgtccgatttcttctacaatttcaatgcaaagcaggtcttctttattcacagcggcaatgatctcatcaagagtgatcggattttcctctgtggcgattcgtgtagatagaatggaactttccccactttgaatacgctctaataagatacgatgaagtgccgatccggaagcttccgtctccaaacaaccttttttcccgcaatggcagattatctcattatcataagcactcatgtgtccaaattcaccggagaatccggatttcccggtataaatcttaccatcaataataattccgatacctactccccagcttacatttacaaaaatgatatccttttctccttttacgcagccttgcatatattcgccataagtcatggcacgcgtgtcattatcaatggttactttatatcccaatttttcggataatacatccgccaacggcctttcctcaaaattgaattggctgaagctataccctgattcaggatttacacgccccgacacatttacattaatatttaagatcttctctttattaatagtgagtttctttataaaattgagaatatgcttgcataactcattcatcccttcgattgagttctcaaacttataaggtatattcattttcaattctaccatatcgcctttgaaatttatcagtccgatattgacggcgaatcttttgatgtctacacccaaaaagtaaccggattccggattaagcccatagaggttgggatggcgtccgccactagtttccaatttgccataatcattaatatatccgtcatcacacatttcaccgataaatttggtgacagtcggtacacttaaatccagctcttttgaaagatcgggaattgtagaacttccattatatatataatgtgtaataatcctctttttgacaagagcacttttagagcctttttctatttctttcaagaattgttggttcataactatgtatatttggtaattcacacaaagataattaatttttttattaatacgtggttttgagaccttgaaaattagaatatcttgaatgttatattccctatatactatgtaatggatttatatataggataatgtagctatggacgattgtggatataataaatgaaataagacgatttgtgaggtaattcccccttctattaattaataatgcgaggaataacgattttattaataaaatattttattatctattgtttatttaataaatatagctatatttgtgccgtgatattattaataaaactctatatccttaaatgaatttagtatgagaaactattttttaggtctgtgtttattatttgctttgtgttttacggcatgctctcattcagatgattctgttgatgtgctaattattggtggaggcgctagtggagtgactgctggtattcagtctgctcgaatgggggctgcaacattgatagtagaagaaacagaatggctgggtggaatgcttacatctgcaggtgtaagtgctgttgacggaaactatgatttaccggcaggcttgtttggtgagtttcgcggacatttggcagattattatggagggcttgattctctaaaaaccggttgggtgagtgcagtgttgtttgaaccttcagtcggaaataaaattttccatgaaatggttgacgcggagaaaaatttaaaagtatggcataatgctactttggtaaagctggaaagagagaatgatgcttggattgctcaaattcagatgaaagataatacaattaaaaaaatacatgctaaaatattgattgatggtactgaattgggggatatagcaaaaatgtgcggggtgaaatatgatgtcggtatggaaagccgtcatgatactaaagaagatattgctccggaagagaaaaataatatagttcaggatattacatacgtagcaatcttgaaagattatggtaaagatgtgactattccttgtcctgaaggatataataaagatgaatttgcttgtgcttgtgccagtcatgtttgtatcatgcctaaagaaccggatcgtgtatggtctaaagacatgatgataacttatggaaaacttcctaataataaatacatgattaattggccgatagaaggcaatgattattatgtaaacttgattgaaatgacccgtgaggaacgtgaagaagccttgaaatatgcaaaacattatacgatgtgtttcgtttattttctgcaacatgaattaggttttaatacattgggcttagctgatgatgaatatcctacagccgacaaattaccatttattccttaccatagagagtctaggagaatccatgggctagtacgttttgatttaaatcatgcttgtgaaccgttcaggcagtctcaacctctttatcgtacttgtattgccgtggggaattatcctgtggaccatcatcatacgcgttatcatggatatgaagagttgcctaatctttattttcatccgataccgtcatacggtttacctttaggaactttgattccgaaagatgttgaaggattgattgttgctgaaaaatcaatatctgtttctaatataattaatggtaccactcgtttgcagccgatggttatgcagatcgggcaggcagcgggagcattagcagctcttgcggtgaaagaaggtaaaaatataagagaagtatctgttcgggaagtacaaaatgcgattttggatggaaaaggatatttattgccttatttagatgttgagttagatcacccaatgtttaagtcactacaacgtatcggctctacaggtatattaaaaggtataggtaaaagtgttgactggtcaaatcaaatgtggttcagagcggatacattattattggcaaatgagttgaaaggattgggtgatgtttatccttttgtcaataagcaagtattcgaaggtaataataccatatcaattcagaaagctacagagctagtaggagagattgcagaaaaagaaggtattgagatgaaagagggtagggtagaagagatctgggataaatttgatttgaaagattttgatatgaatcgaaatattttgagaagtgaaatggcaattttgattgatcagatattagatcctttcaataataaaaaagtagatattatagggcaatatattcaataggtaataataatataagtgttaactgctgttttaattaaactaatatgaaaacattagatcgaagaggctttctaaaaaaagccacattggctggcgcgtcagccttgactgtaccaactttgtttgaatcttgtacttcaaaagctagtgccagtacagtagtggcaactgatggtttggaaagtaaactcattgttcctaaaaacaatggcttaaaaattaccggaacttttttggatgaaatatcacatgatattccacatcagaactggggtgagaaagaatgggacttggattttcagcacatgaaaaatataggaattgatacagtaataatgatccgttctggttatcgtaagtttgtcacttttccttctccttatttattgaagaaaggttgttatatgccttccgttgacttggtggatatgtttttacgtttagctgaaaagtatggaatgaaattctattttggactatacgattcgggtaaatactgggacacaggggatatgacctgggaagtggaagataacaaatatgtaattgatgaagtttgggaaaattatggttccaagtataaaagttttggaggatggtatatcagtggtgaaataagccgggcaacgaaaggggcgattggtgcttttcatgcattaggaaaacaatgtaaggatatatctaatggattgcctacttttatatctccttggattgatggcaaaaaagcaatcatgggaacgacaaaaatgacgagagaagatgccgtttctgtacaacaacacgaaaaagaatgggatgaaatttttgatggaattcatgatgtggtagatgcatgtgcatttcaagatgggcatattgattatgacgaattggatgcgttcttttctgtcaataaaaaattagcagataagtatggtatgcaatgttggacaaatgccgaatcttttgaccgtgatatgccaattcgttttctacccattaagtttgataaacttcggatgaagttggaagcagccaaacgtgccggatatgataaggctattacttttgaattttctcattttatgagtccgcaatcagcctatctgcaagctggtcatttatatgacagatataaagaatattttgaaataaaataaatgttatgaagtctacaatcaattttagttatcttatattcctatctgttgtggcagcattgggaggcttcttgttcggatatgatactgcggttatatcgggaacaattgcccaagtgactcaactttttcaattagatgcactacaacagggatggtatgtaggatgtgctttagtaggctctatcgtaggtgttctttttgctggaatcttaagcgataagttaggaagaaaacttacgatggttatatcagctgtgttgttttccacatcagctctaggatgtgctctatcagccgattttgcccaattggtagtttatcggattataggtggagtaggaataggggttgtgtccattgtttctcctctttatatatcagaactagctgtagcgcagtatagaggacgtttggtgtcattgtatcagttggctgtaacagttggttttttgggagcttatttagttaactatcaattattggcatgggcggagagtggtacgcaattaagtgtggattggttgaataaaatatttataactgaagtatggagaggtatgttgggtatggaaacattgccggcaatcttattcttcataatcatattttttattccggaaagtccccgctggttaatcgtacgtggaaaggaattgaaagctgtaaatatattagagaaaatatataattcaattacagaagcgaaaagtcaattaaatgaaacgaaatctgtgctgacctctgaaacaaaatcggaatggtctttattgatgaagcctggaattttcaaagctgttattatcggtgtgtgtattgcgattttaggacagtttatgggtgtgaacgcagtactttattatggcccttctatctttgaaaacgcaggactttcaggaggagattctcttttttaccaagttctggtaggactagtcaatactttgaccaccattctggctcttgtcatcattgataaggtaggccgcaagaaacttgtttattacggagtttcgggaatggttgtttctctgattctcatcggcctgtacttcctcttcggagattccctgggagtatccagcctcttcctgctcgttttcttcctgttctatgtattctgctgtgccgtgtctatctgtgccgtggtgttcgtgctcctctcggagatgtatcccaccaaggttcgcggactggccatgtcgatagcaggattcgctctgtggatcggaacgtacctgatcggacagttgaccccctggatgctccagaaccttacccccgccggaacattcttcctgttcgccctcatgtgcgtgccgtatatgctgattgtctggaaactcgtgccggagactactgggaagtcgctggaagagattgaaagatattggacccgttcggaatagtaaaacaaaaagaccttaataacttaataataaaagatgtatggattttaagaaactggcaaatcaatacaaggatgaactcttggataatgttcttcctttctggcttgaaaactcacaagatcatgaatatggaggctacttcacctgtttggatcgtgaaggaagagttttcgatacagataaatttatctggctgcaaggccgcgaagtgtggatgttctctatgctttacaataaagtggaaaaacgtaaggaatggctggattgtgccgttcaaggtggtgagtttttaaaaaaatatggacatgatggagactataactggtatttttcccttgaccgtttgggtagaccattggtagaaccatacaatatcttttcatatacattcgctgccatggctttcgggcaattaagccttgcaaccggtaatcaggaatatgctgacattgctaagaaaaccttcgatattatcctttccaaagtagataatccgaaaggtaaatggaataaacttcatccaggcactcgtaatctaaaaaattttgccctgccgatgatactatgcaatcttgctatggaaattgagcatattttaggcaaggactatttggaacaagcgatggatacttgtattcatgaagttatgtctgttttctatcgtcccgaacttggtggtatcattgttgagaatgtagatgtgaatggtaatctgatagattgctttgaaggacggcagattacccctggccatgcgattgaagccatgtggtttataatggatttagggaaacgcctaaaccgtccggaattaatcgaaaaggctaagaacatcactcttacaatgcttgaatatggttgggataaagaatatggaggtatctactattttatggaccgtaacggttgtcctccccaacaactggaatgggaccagaaactctggtgggtgcatattgaaacactcatatctcttctgaagagttatcaattgaccggagataaccaatgtctggaatggtttgaaaaagtacacgattatacatggacccattttaaagataaagagcatcccgaatggtatggatacttaaaccggagaggtgaagtgctactaccattgaaaggaggaaaatggaaaggatgtttccatgtaccaagagggttatatcaatgctggaaagtattggaacagctataaacaataacggatatgttaaccaatctatattaataatctaaaaattaattctatgacagagtttaactcaaaaatcaagaagaactctcgtatattgaaaatatttatgttttcaatctgcgcgctatttgcatgtgctatcagtagtcatgcacagagtttagtgaaaggaactgttactgatggtataggagaaccgctaccaggagtaagtgttgtcgtaaaaggaactactaatggcactattacagatgtaaatggaaaatatagcattcaggccaccgcaaaagacattttatcattctcatatgttggaatgtcagatcaggaaataaaggtagcaggtcagacgaccattaatgtggttatgaaagatgatgtggcagctttggatgaagtgattgtggtaggatatggtactgccaagaagcaatctttaaccggagccgtatctgcggtgaaaggcgacgaactgctgaaagcaccggcaaccaatgtgtcgagtcttttaggtggacgtttgccaggtatttcatctgttcaagtatctggtgaacccggagacgatcaggctacattacgagttcgtggctctatttataatgttacttatatagtagacggaatgcctcgttctattaatgatattgaccctaatgatatcgaaagtgtatctgttttgaaagatggagcttctgcagctgtttatggattaaaaggagccggtggtgttattattataactacaaaaaaaggtcaggaaggaaaatccaaaatcacttataatggttcaataggagcatctatgaatgcaaactttccgcagtttatgaatggacctcaatttgcatattattataatatggctgacatgatggataaaatggctaatggaagcatttcaaacattagtcaatataatcccgtttttacaaaggcgaatgtggaagctatgttgaatggtgatcctactgacggatgggataatgttaactatattgataaagtattcggaaccggtattaatcagaaacacaatgtaacaatacagggaggtagtgataagatgcgttactttgcttctgtgggttatttaggtcaaaaaggtaacattgacaatttctcttacaagagatacaatttaagaactaatcttgagactcaactggctaagaacttccagttaagtttaggtattgcaggaaatgtcggtaaacgtgaaactccgggatatgcttcaggcggtacggattctaattccgaattgggtgaacaaggttggttgtcagtagctcatcagactataatgatgcatccctatttgccggaaacatatgacggactttatactgctactacacagaataacacaagtctgcccaacagtccgttggctgctatttatgaatccggatacaagcataccaatagctttgatttgcagaccaacatctcattgcaatacaatgtgccttgggttaaaggtttgagtgtaaaagtaaccggagcttatgactatacaacttctcataataagaatttgaatacgccttactccacatatatacataaaatgccgacttcgacagcagattggacttggtctaaagcagacgatcctcgcggcacagcaaatggaataaatttaggtgaaggacagtatagttctcatcaaatggtaggccaaggaagtataaactatgcaagctccttcgaaaaacataatgtagaagcaatggtattggcagaaatccgggattataaagaaaacagtttctccggctataataaaaacatgagtttctctgaactaccggaattgagctttggacaacctgcagactctccaatctcgggatacagtgatgcaaaccgtagtattggttatgtttttcgtttgaaatatgactatgacaataagtatttggcagagtttacaggtcgatatgatggttcttacaaatttgccggcaatgttagtgggaaacgttgggcattcttcccgtcagcgtcagtagcgtggagaatatctaaagaagattttatgtctagtctgacatttctggatgatatgaagatacgtgcatctgtcggtttattaggaaacgatgcagtgagtccgtatgctttccttagtacttacaatttgatggatggtaacaaaaatgcataccagacaattctgaatggaaaagtaatgcaagcattacgcgcctctgtaattgccaatcctactctaacttgggagaacaccttaacctacaatgcaggatttgactttacgatgtggaatggtctgttgggaatggagtttgacgcattctataattatacctatgatattttgacagcaatgggaggcgattacccgccatctatgggaggatattattatacttatgccaactataataaggtggatagcaaaggcgttgaagtaacggtgagtcatcgtaataaattaaacttggcaggtaagccattctcctatggcgcaagcttcaatctgacatttgcaagaaaccgttatctccgttatccagatagtccgaacacagtagagtggagaaaacgcacaggacgtagtgttgatgcttctgttgtgtgggttgcagatggcttattccgttcggaagaagaaatagacaattcagcctggtatggcactcgtcctaatgtcggtgatatcaaatacagagatttaaatggtgatggtaaaatagacgaagatgacagaacacgtgttggacgtggcaatcgtcccgaattaacttacggtttgaacctgaattgtgcttggaatggattcgatttaagtgcacaatttactggaggtgcactgtttgatgtatcgttgacaggaacttattacaatggatatgacgataatacagtctggacacaggcatttaaagaaggagccaactcaccactatatctggttcagaatgcatatacagtagaaaatccgaatggaacattcccacgacttacactgggtaatcaaggacacggaggagataatggattagcttccactttctggttgcgtaacggtagataccttcgtctcaaatccgcacaattgggttacacattccccaagagatggatgagtcctgtcggtattcagaatcttagaatttatgtagaaggttctaatttattcacgatttccggtcttcctgatggaatcgatcctgaatctccgggagtaaataacggatactatcctcaacaacgcaccattatgggcggtataactttgactttctaaacctttaaaagttctattatgaaaacaaaagtattaagtatcatattgttgggagcctctttagggcttggctcatgtagtgattatctggacatgactccaacagacagagcatcagataaacttgtatggagtaaactcgactatgcagaacaggcagtcaacgatttctatcgctatatagattatttaggagtctacagggatggacaatgtttggcaggaatgacagaagctctgacagatcagcttaaatatggttcctacaactatatggctaaatgtcagatacctagtgaaattgcttatggaggttctgttctcacagtgaattatgttagtacttaccttggcaactgggggacgatgtacgaatatgtgcgccgtgtcaatgaaggtatcaacaaattaaagaaatatgcttcatttggtcaggctgatgaagaacgcttggaagctgaaatgcgtttcttcagagggtatctctatacagatttattaaagcgttataaagaagtgattatatacgatgagaatctggataatataaaaaaggatatgccagttagttcggaagccgacggatggaattttgtatataatgatctaaaatatgccggtgaacatttgcctgttgataaaactcctaacggacgtttaactagcggagctgcttatgcaatgttatcgagagctatgttgtatgcggaaagatgggatgacgctcgtatcgcagctgaaaaggtgatgggaatgggttatgaattagaagcaaaagaagactattcaaatgcctttaaagcaggaagcaaagaagccattctacaatattgttatgataagagttccactgtgactcatgactttgatggatatatggttcctgggggtgataaagcgctcgacggcaattccatgaccggaggattcggtaccccgacacaagaaatggttgaatcgtatgaatatgcagatggtagtggtttccccgattggagtgcatggcatactgctgaaggtactacaacgactcctccttatgccaaattggaaccacgttttaaagctaccattctctataatggagcaacatggaaaggcagaacgatagaatctttcgtaaacggtactgatggttgggctgcatggaaaacagatgccaaaccggaaggacgttctactaccgggtattatttacgtaaattggtagatgaagctcataattttacttccatacaagccagtacacagccatggacagaaattcgttacgcagaggtattactgaatcatgcagaagcatgttatcatctgaatggctatacggataaggcaaataaagacataaaagatattcgtaacagagtgggattgtcttacacagacaaaagtggggatgatttaatgaaagccatccgtcaggaacgcaaagtagaacttgcttatgaaggacattattattgggacatgcgtcgttggaaattatctgcgacagcattcaccggtattcgtcttcatggaatgaaaatagagaaaaatgcaaatgggtctttcacttacatttatacagaatgtgatgataaagatcgtaatttcccgactaagatgtatcgtttcccaatgccacaggcagagttggacaataacggtgcggtaactcaatatgcagaatggcaataaatctaaaatgaaaacattatgaaaaagaatatactatatctattattagggattttggctctcacgagttcttgccaggatccggaatatgtgcttcctactgcggacagacagggaatcacgagcttgactgcactctttacttctgggccatacgtggataaagaggctgtggtatatactattgcagatgcttctgtagataagtatgtaattcctatgccatggtattatccggaaaatagtgataatgaaacttcagaatatatgaaagcgatgaggattcaggcaaagttggcaccaaactgtactattgaaccggttctttcaattctcgatctgactaaagagaattatttcacttatacagacgctcaaggatataagaaacaaatctgcatcacaggcgaaagagttaagtctactaagtgtcagttattaagtttctcaataccgtctgaagacattacaggtattattgatgaagaccacaaaactgtatctttaatctctgcggaagatttatcttcttgcttggcagattattcactgtcggctcatgcgaccatgtcaccggatcctaaaacagagcctcttaattttaattcacctgttgagcttacagtgattgctcacgatggagtgacaaagcaaacttatactattcaaaaagcagtaccggataagattccttacggatatagaaaaggtagtgagacagaattatttaaattggatatgggagttatcggcttaccttggactggagcaaatgcaccttctttagctgtttccggaaataatctggtagtttgcttgggtgatggtaccacaactcctgcatattacaatgcatctacgggaaataagattggtaatgtaactttgggtagtgtgagtgttgcatctttaggatgtatgacaagtgatagtaggggaaatatattattagcaacgaaggctactaatggcaagtctttctcaatctataagacttcttctgttacgactgctccaactttattgactacttatactaataatacagggttagatatgggtacgaaagtgtctgttcaaggagatattaatactaatgcctctattattgctacttgtgacggaacagccagttcaggttccaataagtttgttcgttggattataacagacggtgtattgggaagtcctcaagtagtaacagtgaatggtgtaggtaattggggagctcccgcatcaaacactaaagttgtgactaaaggaactactgctcaaagtgattatttcttgtcatactatgattctaacattctttattgggtgaatggaacaaataataatgcaagtaaatctctggaagactccgacaatggtaattcttgggcaatgaataacaactgtctggatacaagaagctttaataatgcacaatatcttgtattggtgtgtacagctcatttcccgcaatggggtggaactccatgcttatatatgtatgatgtaacgtcagacggatcattcacaggtacaatatctacttcagatgctctgtcattcaatccttcactttcctcatacaattcatccgatggtgtagctgcaacaggtgatgtattgcttgctccgacaacagatggatataagctccgtgcttactacgtggataacaactgtaaggttatcggaggatatgagtttgattgtatcgacaaataattaattgatctctttatctcatatatgatgagaaaatacccattcatcatatatgggataaagaaatctgtaaatcatttaaaggagtagctatatgtcaacaaagaaaaaaatgttatggttattatcattactgccttttttcatagcatgtggtgatgataacactgatatcccggattggccatgggcggagccggagactccaactgaacctgttgaagccaatcctgatattgtaaatttaggctgggccaatgtgaaaagcacttatggaaccttgcctgaacatatcaacgtatataaatcaccagaaacactggaaggcaaaaaagcgatagcttatattgcggtaggtgatatgagtaaggcagcatttggtgtattaggagaaaagactggattgaaaaagccaaaagaattttatgaagagaacaactccacaattgtaatcaatggaggtttcttctatgaggggtcattaagcctaatatggcgtaacggtgaaatggtgtgtaagaacaatgatgtaacagcagaagattggactaacggtccattctggtatcctgtattagctgcattctgtgaaatgaacgatggctcattcaaatcaatgtggacttacacaacactatccaatgttacttattggtattcggagccctcaccggtaaaatcagaaacaactcctaatgaaaattttccgtctacaggaactgtcttaaatgctaaaacaggaataggcggtggccccgtacttctgttggatggaaacataaagaatacatacgaagaagaaattttatcagatattggcgccacggtgaacagacctcgttcggctattggtatcaccaatgataagaaaatgattctttttgtgtgtgaaggagatggaatgacaacgggagttgccggtatgaccaccgaaaatgtagctaatatcatgaaaacactgggatgtacggatgctatcaatttggatggcggtggttccagttgcatgttagtcaatgggcaagagactatcaagacaagtgactccagcggagacgaaagatccgtagcatcagtagtcactcttaaataaaaaatgtactgcggatatatcaggcagtatatacctaataaaacaagtatgatatgagaaaatttctaaaaatactaatactgactttcttgggagcagttacaataacctcctgtagtgatgattctgatggaattcccggatggccgtggaacgataattcgacagaaaagccggacgagccggatgttgcagaagctaagccacgatatatttggattgatgcggctgctaattttcctgactatgccaatagtaaggaaaacatagccaaagatatggaaaagataaaagcggcaggattcactgatattattgtcgatgtacgtcccactacaggagatgtattattcaatactaatgttgtagatcaggtgaaacgtatggatgtatggggtaattccggatatagttattatgaaaggacggaaacttgggattatttacaggcatttattgaggaggctcgtatacaaggattaaaagtgaatgcttctatcaatacatttgtaggaggctatttatgtccgtataatttaggacatgatggagtcttgttccgtgatgaatcaaaaaaaggatgggctagtgtagctaatctagctgacgggctaaccaatacgatggatttgttggacgatgaaaccgattatggagcgaaatttttcaatcccgctaatgatgatgtacaaaactttgttttacagttgttggccgacttggctaaatatgatttggatggcatcatattggatcgttgtcgttatgatgactatggcttagaaagcgatttttcagatatttccaaacagaagttcgaagaatacatcggtgaaactgtagcaaacttcccggcagatattatggcacccggtacggatgaaataccttctgaccagcctgtttattttaagaagtggttggaattcagagcgaaagttattcatgatttcatagtaaaggcacgcgagaaagttaaatctgtcaataacaatatcaagtttggagtttatgttggtgcctggtattcaacatactatacatcaggcgtgaactgggccagccctaaatacaacacctccgcttattatccgaaatgggctacttccgattataagaattatggatatgcggaccatttggactatatctttttgggtgcttatgcttccgtgaacaatatatatggaagtggcgaatggaccatggaaggtttttgtaagaatggacgtgaactgttacaaggagatgtaccttttgcaggcggaccagatatcggtaacagtaccggatggactgacggaggacaatctgcaaaaattccggatgctattgatgcttgtatcagtaatagtgacggcttctttgccttcgacctttgccacgttaagaaatacgactattggaacgcttttaaaacaggctttgataaatatctggaatctatcgaagaatgaggtttgaactaaccaactaattatgaaaatatatttattacaattctttttattaataggtctgggcttgaatttacaagcccagattccttctaaccctattcgcgggaaagtaacctgtaatgggacaggagtcccgggggtagtagtgaccgacggaataggctgtgtgttgactgaccaacaaggccaatatactctcccccctaataggaatgtgcgtttcatttatttatccactccttccggatatttaccgaaaacagaacaaacaatacctttattctatcagaagctgaatccggccaagcaagatatttacgacttcgaattggtaagaaatccgcaaaatgagatcaatcatttgtttttggtgcaggcagatgcgcaggttacttccgaagatgacgtaaaggcttatgctaaatatctgcaagatatgaaagaatatattcgtccgtatatgggcaaaaaagaagtattcggcatagattgtggggatatcgtaggagatactccttctttatatccttcctatatagatacggtatcatcattagagattcccatctatcgggcaattggtaatcacgacatgacgtatggagggcgtacttttgaatattcttatcgcactttcgaaagttatttcggtcctatctactattcattaaataaaggtaatgctcattatatcgtgcttgacaattgcttttatgtcaaccgtgattatcaatatataggttacattgatgaacgtactttccaatggctggagaaagacctctcttatgtgcccaaagacaaacttgtctttgtagtgatgcatattccttccagtcttcagaagaagctaagatataacacgctagatcaagatgaaacggtcaatacagctgcactatataaattattggaaggttataatgcccacatcatttccggacatacacattttaatgtaaacgtatgttttaatgactcattaatggaacataacacagctgccgtatgcggtacttggtggcgtgcagatattaatgtggatggtactccgaggggatatggggtatatgaagtagacgggaaccaagtgaaatggctatataaaagtgcaggctacccgaaagagcatcaattacatgtatatcaggccggatcatctgacgagtacccttccgatattattgctaacgtatggaactgggatgaacagtggaaagtggaatggtatgaaaacggaaagcgaatgggagaaatgcaacgctacaaaggatatgatcctgcagccaaagcaatctgttctgacaaagaaaaggtgaaatatgaatggatttccccagttcttaccgaacatctatttcatgctactccccgtaataaaaatgctaaaatagaagtgaaagtaacagatcgcttcggcaatgtgtatactgaagctgtcgaaaacaaataagaatcatatgttgaaagccaaatattttatattattgatatgcttctcctttctcctgaaaacagaagcgaaagtaacccttacttccatttggggggataatatggtgttacagcaacaatcggaagttactttttccggaacagcgacttcgggaaaacgtgtgcaggctaccgcttcatggaataataaaaaaatccaaacgaatgttgatgcaaaaggtgaatggaaactttctctccaaacaccggtagctggaggtccgtatagtattacgttctcggatggagaggacctcacattgcagaatattttaataggagaagtctggttctgttccggacagtcgaatatggaaatgccagtgaaaggattccgtggacagcctgtgtttggttcccagccatacattgtatctgctaatcccaaacgtccactgcgtctctatactgtaaaaaatgcctggagtaccattccacaggaagctggggtggacggagaatggaaagaagcctctccggaagatgttgctgatttcagtgcaactgcctatttctttggcaatcagttacagcaatctttggatgttcctgtcggtctgatacattgttcctggagcatgtcaaaaatagaggcttggatgaataaagagactttatcgggctttccggaaatagcattgcctgatgtaatacagagagagttcgggtggacggcagggactcctacattattgtggaatgcaatggtgaatccatggaaaggatttcctgttaaaggagtgatttggtatcaaggtgaagcaaacacacccgatcccggattatataagagattatttcctgcaatggtttctcaatggagaacattcttcaacaatccccaaatgccattttattacgtacagattgcaccatggaaatcggaaggcaatgataaactggattgggcttggttccgccagtgtcagttggagttgatgtcagctgttccaaatgttggaatggtgaccacaggtgatgccgggagtgaaaactttattcattcgccctataagataaaggtcggtgaacgactggcttattgggcattggcaaaaacgtatcatcgtaaaggtattcaatattccggtcctatatacaaattccaccgggtaaaagggaacgtagtagaaatagactttgaacatggtgaagaaggattgacaccggaaaatcaaaacgtgaaaggatttgaaatagtggggacggatggtatattccgaccggccaaagcggaaattatcagtggttcttctactgtaaaggtctggaatgattcgatcaatgaccccatagaggtacgttattgtttccggaattatatgttgggagaattatgcaataatgcggctattcctgcttctcctttccggattgtaatcaaaaagaaacctgcgttaatgtggttcgatgccgaagctaacttcgaacgtttcagccataaagactcgattgactattatttggagaaaatcaaatcagtaggtttcactcatgcaatagtggatatacggcccattacgggagaagtactttatcaaagtcagtttgccccacaaatgaaagagtggaaaggcgcaaaggccgggaattttgattatttgcaatacttcattaaaaaagggcacgaattgggtcttgaggttcatgcttcattaaatgtattctgtgccgggcataattatttcgatcgtggaatggtatacagcggacatccggaatgggcatccatggtgtatactcccgagaaaggtattattccgattacggaagaaaaacataaatatggtgctatgatcaatcctttgaacgaggaatatcgtacgcatattctaaatgtactgaaagaagtggtgaccaaatactctgatttggacggtttgatgctcgatcgtgtacgttatgatggtataacagccgacttctcaccgctgtcacgtgaaaagtttgaagcatatataggtaagaaagtggcgaagttccccgaagatatttttgtttggaagaagaatacggatggaaagtttatcacacaaccgggaaagtatttccagaaatggatggaatggagaacgaaaaacattactgattttatggcattggcacgtaaggaagtgaaagccgccaatccaaaagtttctttcggcacatataccggagcttggtatccgtcttactatgaagtgggagttaatttcgccagcaaaaagtatgatccggctaaagacttcagttgggccactcccgaatataaaaattacggatacgcggaactgatcgatttgtatgcaaccggaaattactatacagacataacgatagaggaatacaagaaaacgaaccgcaacatctggaacgagactgattcgcaggctcaagccggtacatggtactgtgtagaaggttcctgtcagcacttgcgtcagattcttaaagacaacaagtttatgggcggcatcttggtggatcagttctatgataatccggggaaattatccgaaacaatagagatgaaccttcgtcgatcggatggactaatggtattcgatatagtacacatcatccaaaagaatctttggaaagaagtagaaaaaggaatgcgcgaggggggagctttatgaacaacagagctttagctttagatgccttacggggatatgcaattattacgatggtgctttcggctaccatcgtaacgcatgttcttcccggttggatgagtcatgctcaaacgcctccgccagatcatgtgtttaatcctctgttgcccggtattacttgggtagatcttgtgtttccttttttcctgttcgctatgggagccgcgtttcctttttccataaggaagcgtgctgaaaaaggtgattcaaaattaaaacttgtttatgaagctgtcaaacgggggattcagttgactttctttgctattttcatccagcatttttatccgtatatgttaagttctccgcaggatatcagagcatggctgctggctatactctgttttgctgttctatttcccatgttcatgcgcattcctttgaaaatgccggattgggtacatatttcaataaaagtgggagcttacattgtcgctgccattatgttggctaccacttcttatgcggatgggaaaacattcagtttattctccagcaacattatcattttgctgttggctaatatggctattttcggttctatcctttacattttcacaatgcataatcgttggatgcgtttaggaattctgatattgctgatggctatgatagtagggagtacggttgacggttcgtggacacagagtgtatttaattatactcctctgccgtggatgtatcggtttgattatttgaaatacttatttatcgttattcccggcagtatagccggggagtatttagcggagtggatgaaagcatatcaaaaagagacggatgattatgctacatctccttatcgtaaaatgagtattatgttgatgatattatccgttgttatcatcattagcaatctttacggtctatacactcgtaatttggttgtcaaccttgtgtttactgttttattgttattagctggtaagtgtatatttccacgtaaagtggatggaatagctttattatggagaaagttgtttaacgcaggggcatatttacttcttctgggtttgtgctttgagcctttccaggatggtattaaaaaagatccaactacttttagttatttctttgtcacttccggactggcttttctagctcttttatttctaagtatcgtttgtgattatttccggtgtgtgaaaagtactcgttttttggtgatgtccggtcagaatccgatgatagcttatgtggtcggcgatttgttgattatgccattggctaatatacttggaattgcttcattattatcttattttcaacaaaatgcctggttgggatttcttcagggagcaatccttacttctttagctgttttagtaactatgttcttcacaaaaatcaagtggttttggagaacataaatatcaatgtgattattttatattaaattagttgacatactgtcgttttttctttgattctactattttccactttttatgaatgaaagaaagtagagcgagtaaacaataaaatacggtatttatatgcataattacgaataaaagaaccggcatttgcatataaattaccgtattgtttgtgaaaaatacacggttgattgtaatgaaacgtacggttcgttttaaagaaacatacggttggtttataagaaacagcacgtacgttttaaagaaagctatttgggctcataaaaataggatttattgatttattagaagtgcttttatgaacttactttattaaacaaagtgcataaatagattaagaaatacattcactatgcaatgcatgatatcaaataataatgattatgctctctaagggaaggatttcaggaatttctgaataatactaatggctaatctatgcgattcttttccgtatctgactgctcgcctgaataaattcaattatagcatcattcaaataccaaaatgataaaatatcattttggtatttgaagatttatttttattgatataacgtaaaaagcaacagtcaagagtatttggaatagttgaccatctgcttttatttgtgtaatataggaatattcggttcttttattactgtttaggaacaagacaaaggagaactacaccgtgagccggtactttgaaactatacctatctccagtatctccaatatcttgatgtttccaaacatcacgtactatgtaatgatcgtaagttcggtctatcccaattatgtcaaatccccaaaaatggtaatcaagagaccattctttttcatccttgttcaagaaacataaggctatacggccatctgacaattctttgatccatgtctcatgatatcttccactacgttcgaacatacggccttgttttccgagcttatcctggtttatggcgatagcttccttattggtaagtatatcaaggattttcttatcaatattacgaagatcacatcctactatcagaggtgaagcgagcatgcaccacattgagaagtgcatcacgttttcatcgtatgttagatctccattgcctacctggagcatatccgcgtcattccagtgtcctggtcccgcgtatggccaaagaggagccataatatctataattttcagaatgctcgctcctccccagtatgctgtaccttcggttgttgcaataatatcttcggataccctccacatctcaccgatacctttcccccattcccatggcctattcgtcccccattcacaaattgatagaactataggacgaccagtactttttaaggcatcacacatggtaaagtatgcttctcgggcattagctccgttgttgtggcaccagtcatatttgagaaagtcaactccccattctgcatatgtgactgcatcgatatattcatagcctcggctaccgggtctaccagcgcatgtcttcgaacctgcacaagaatatataccgaatttcaaaccttttgaatgtacgtaatcagccaatgctttgattccagacggaaactttaccgaatcagattgaataacgcaagactcccgatgcgtctgccaacaatcatccacattgaggtatgtatatccagcatctttaagtccggtagagaccataagattcgctatttcgcgtatttgttcttcactgatattcttgttaaaacagttccagctattccaacccatgggtggcgttggacataacacttttttatgcttttgtgcatttgcaaaagtggatagaaatataaatagaaataaaagaatctttttcatatttaaatcagatatttcaaataactttaaattttaagcacaaagttcattagtcaaatcggtcatgttaaagtatttaagacaaataggacaaatattgctatttttatttgattgctttcttaatgattggacaaactaaatcagcatatctcatcatgcctagatctgtgaaatgaataccgtctatagtagcttctccatcttcttccaacatgtttttggaagagataaaaatgatattcttttcattttccttctttagccggttgaatatttcctttaacgtgtcattctttctttgcacttctttagcaattctttcatcataaagtgtatgagtgaaaatcggatcttctataaaaatgactggcgtatccggatgtttactacgaatgatacgatagaatgtttccattcgttctttcatctgttctacagaagcattaggcacaaagtctaaaacaaaaacactggcatctacttcggctatcactttggccacttccaagtctaaaagtgcatttccgctaaatcccaagttgatacattcacggttcagccttctcgatatgatatttgtatgtgccattccgggacgtgaagcacaacctccttgaagaatactggtgccataaaatacaaccggctttttgcggatcggataatcaattaaaggctgatcgatggtggctaacgaatctactcctatagacaaagaaacaagaccatcgtaaagaggaagataaagcatatattctctctcttccggtcgcatgttagcaatgattgttgcttgatttgtttttccacccggacgaccactatttacaaaacgccactctccatttttctgaagacaataaaggtctaagccttttgcgcctgtatccgtcatatgattcatatgaaaattgatgagtgtttcccatttagcagctattgtggtagaattactacgaaaacgtatcgccattccggcagagttacggcttaaattccataacggagcacgggagatattcttcaatgaatccgggagtctttcatatcgggctccggtagcttcggtagcttttcctaataaagggaactttgaggcatcatgatatactaattgagcatatgtatgacacaccgaaaaaaacattataaaaatacagattcttcttttcatattttgagtattattgtttcaagtccgccaaaaacattttattcgggtgaagaacatagttatcagtactgataatgttgtcaataccactcctcgtaaaaatcccatccatgcgttttcgttgaaatatacaagcaatgatgcaattcctaataaattgaccaaaggcataatcaacagatctcctactacataagccatcataggattttgtccgggcattacgagaaaacgcatactcttcacgcaacgaaaatagtcacatattacatttaaaagcaacaaagccataaatgccaggcctgaagtgaggaataaataaccaaaagtggcggggtctttttttatacctccttgaaaaggttcaaaacataatcccaagataactagaaaagctccggctgtaaaaagttctctccaaagctttataaatcctgtgccttttctcaataaaaagactccacttatcaataacggaatatttattatcagattcaagactgtacaatgtgtataaagtcctgccaaatttacaataattatagctaatgtcaaaagaatcattacgatagctttccatttattggtagattcaacaaacgaatcattgtgttgcttcagccaatccatcaaatattctcccgcaatgcttcccggaatcacgataaagagatattgtaaatactcaaaatgaaaagcccaaggtagaggtgtgtagttgtatatagcttgtgcccaggaattctcgacctgtccgctcaacaacaaagccatcaatatcagtaatacacctactcgcgcccagaggctttgcattgtgaaaatatatatggctgaaccaaaaacagccatatttgccaataataatatgataatattgctgaatgatacatcaaaaactcttccatttgcgtattgagttgtcagtaacagaacaatagctatcccatatgctaccaccttaatagctatacgcatccaatccggcattttcagtggaatacgaatgaacatggggaataatatcacaaaacaaaggatggccaataaccagccacgcatgtcttgtggattactcaatacatgcggataaaaatgctggatgaaaatagcaaagaaagtcaattgtgcacctcgtttgatagcttcatataccaatctcaacttagtgtcccctttctcaaatctttttttgattgagaaagggaaagctgctcccattgcaaacaagaagaatggaaaaaccagatccacccaagtgatgcctgataaactggcgtcgaaagctctgtccggcggaggagtttgcgcatgatacatccatccgggtaaagaattccacgcaaccgttgccgaaagcaccattgtgattatagcgtatcctcgtagggcatctaaagcataagcacgtttagtcataatatctatggattgatcgtttgaatatattctttgccaaaacggtcggtaactttaaccactatacgagcatctttatttttaggagttgcccggaacatatgttgggtaggtcttggagtaatccatgtatagaccatcttttcccggtccgaacataccactgatgcgtatgggtctaaacctgtatattgtgtcatgcttcccatcaattgaccgtcttccaaccattccactttccacagtttatcccagttccagacattagcgataatatccgacggatgttctttggaggctcccgccggatatgagcgaaactgatgttctttaggatatccggaacttttataataccatttcacatcgttaccattcacttcgtatacgccataaccacgcggagtgccatccagacaaacatccgctttccaccacgtaccacaaaccgcagctgtattatgttccatcagattctcattaaatactacattgagattgtagtgagtgtgtcctgtgataagatgtgccttatagggtttcaagatctgatgcagtgcaccagcattaaccatctgattgccaatcatatcatagttatacaaaaaagcttcttgcttttccgtttgacgggaagggatatgcataataaagaatacgagtgaccctttcggtacgtatgataaatcctggtcaagccatgcaaatgtcttttcgtccagataacccatataaaaataatcacgtccgatgaagaagttgttgtctactacaatgtaatgggcattccctttattaaaagaatagtaggaaggaccaaaagtatcttcaaaagtcttgtaggaagtttcatgagtacgaccgtcataattcatatcatgattgccaactacacgataaatgggtatatccagttgatcggctcttttcaggtaatcgggatataattcttgatggtcgcctacaatgtctccgcaatcgataccgaaaacatcagttgttgcataagaagagagaagttgtttgcaatcatccactacatactgataaatagccagttcatctctggaagtaacctgtatgtcagattgagtaacaaagacatgagagacatcacctttcggattcttcttcaaattaaaattatagttttgctttttagaatgatcgattggtaaataaaaagaaggaatagtccctttccggtctgtcagataacctgaaggagtacaaatatacacaaaacggctatctcccaaagtcggtatattatactttccagaagcatcggtttgcacacatatacggccatcggtaaccattatcccctgtatccccttaccttcgcaggttactttacctttgatgatatgaatcgaggcttctgcctgaactgaaaagttcaagcagaagcacattaaaagcaataaaaaaaagtgtagtttattcgttctcatattgaggtgtactttgtaaatttatcgaatgatttcttttgcgtatttcttatagatttgccgggctagttttattccgtcaccaccttcgttatagttgattctgttactcggatttacccattcgttttcatacatccgtgattcattaaagaagacttcctcatcaaaagccttcttcttttcgacagctttaatcacttcatttataaaacgatcccaccggacagaataatactgattggttagtcctgcccatgaccgattggcgtagtcggtcaggtgatagctatctccccaaatggtaatcagagaacgggcattcatctcataatagtttttagaagtggcatcgtgtcccatatcgcgggcgtcagtgatccatttattcagagaaaaggtaggatgacagctaacgagcttatcaagatcagcaagaatttctctcattttatcccctcggtttttcatcatcattatatctccggcttcatatgcaagagtaaactcatcacggactacattaaaataatttcctaaaacttgtcgtccaatattaaccaaatcaaactcatagctatcccgttgacagtcttttactaacaatagtaatctccacgcttcaactaaatctttgggttgatattctattgtcggcttagtagtccaatgtccatttccctttaaacaaggacgtgcattggtaagtgtgccttgccctacttgtgccggctggatatacactttgtctgccagtatttcccatgcttttcttgcttcgggagacaccttgccagtccgtctatctgccagttttaagaaccattctttgtctgtctgaccgctattccatgctttatcaagaacaaattcatacataaactgattcaggtctatgccttcaagagtggaaccaactcctttaagattgctgccaccattttttaaagcatctgccaaccgttcacttaccaatttaactggccctgacaagaaagaatttcctccgaaattgcctaaataacaccaaagatagggttgcccgaaataactatcagtctgtttccatatttctgtatattcgcagaagtagtctaatagaatcaatttgtcttgaggtacagaacgaagataggattttatacgtggagtagtccaatgcttgatgtcagcataaaacaaccatgtcatttgtagccatattgctttcggatctacagcagccacagactcgtagatatgtttagccatcattcctaaagaatcggtatcccatgaaggaggatctatctcgttaaacggatctataccataaatatgatttgtgccatacaaacgagtttgttcggtaagatattctttttgtatgatcgcatacaaagaatccatagggttaaggaaagtgcaacgatattgatcggcgaatcctccccattcgcttactctggatgtttttatattgggatagacccgtttcaacgctgccggtacatgtccggcaaaagccggtaatacaggttgcatattaaactcacgttcacgggcaacgatctgttcctgtagctctgcttgacttgacagccactctttgggtaaggggctttgccagccgtccaaattacacattcgatgccacggaagatgtgcaggtcctgtaaaatagccacgtatttcttcatctgtcaatcctaatttactccagaccttataccagatggcttcctgaccggtaatagcaagaggcatattaattccgtttagagccatccaatcgatgaaatgttcccaatcactccatttccaccaagtcattgagtatccgaacgtacaatagttcagaaagaaacgcgttgggacatttgccttaatagtgacttccgccggtatattaggaagagtttttggcaattctatcggatcatccttataccatgaaatagtagtcaggcagtagtttttcaaataatgattcaaacctacagccatagagttagcattatttccggaaataataattttattcccttcacttttgatggtaaaagaatctgtagaagtatcattcaacagacgaaaatcaaaaaatgaagcctgttgaggaaacaaccgttgtgtcattttacgcatggtagtgatatttgtatcttccgcgcgaatttggcagatgacaacaagaaaaaggagcacactaaatattttcttcataatcatattattgtttgataaaacgaatagcacatccaccgcttgttgccagtttgacatgaagcgtatcagaagccgttactgttttttcttcatatttaaaagaagtcggatttgttttccattctgcatcatcaccgtcagcatatatttgagcaatatactttgcctccgtctccaaaaaacttaaaggaatgtccaactctcttgcattttcgtcagtgatgcaacctacataccaatcgctggagttacgatcttttcgtgcaaatacggaataatcaccaattttcgcatctacgacataagttttatcccaatcggtaggtacatccttaataaaatcaaacgcttttatctctttataattttctggtaaatctgaagccatctgtaaagggctgtagataacaacaaagagtgctaattgcttgcaaagcgtagtattgacacgtgttcccggatatgcctcgttagtaaaattgaaagttccgaatgtaaaatccataggaccggctaatcctctggtaaaaggaataacagttgtatgttccggaggatttcctccatcgggagaccacgcattgtgttcctgtccgcgtacaccttcttgggtcataaggttgggccaggtacgttcaataccggtaggcataacaggctcgtggttgtcaattgctatttgatatttggcagctgtttctattactttccggtagtgacgtacgccatactgaccgtcatgagcttctttaaaatccattaggcgatttacatatcctgtttttacaacatgtactccatattgttgatagaaagcaaaagctttgtccagttggttctcatagttgcgtgtagcagctgccgtttcatgatgtccgatcagttccacacctttttcacgggcataatctgtaattgctttaatatcgaagtctggataaggtttggtaaagtctaaagaatcaccatgcttcatccagtttccttcccagccgacattccatccttcaactaaaacaccggagataccattctctgatgcaaaatctatatatttctttgtattggcagtagttgcgctatgtttaggaccataataccatgttcctttgcccaaatgcatttcccaccatatacccatgtattttcctggctttatccaggaagtatctttaattttggagggttcgttgagattcaacattaaataggaggtaactagatcgcccggtttatcaccaatcacgatcgttctccaaggggtaacaaatggagctttgatatatgctgctactccattagaccaaggtactaacgaagcacagagggtggcagaatccttgactgtcagattcattttaggataatctgtcagattggcttcgtgaatggtaagatactttccttccgctgtttccattgtaagaggagtacgtacggtgtctagttcgttaatgggagagaaggttgctatacactcataatacggatcggatgcaggaatccaccaggctttgtgtgtacctgacattctaaattctgtttcttcactcataatcactaatgaatccatggattcctgttgcgggaattcataacgatacccaataccatcattaaacagacggaatattacattaagtttgcgctttccgtctgtttcttggagtagtaccttcaattcattatagtgattgcgtacataccggctctctccccaaggttgttcccaagtctcgtctaaagaggaacgttcggtacctttaatcacaaagtggtttaaactatcctcatgttccagaataaatcccagtttagaagggagtatcatagcggcgttttctttgtttactgcgtatgatattgtattatcattttctgtgactgttagttgtattttaccatccggagattttagtaccagattatcagtctcgttacaagctgaaaggaggctggtgattcccagaatataaaatactctccttaatacagttaatcgattcatcttctttcctttttttatgtttttgcttatttagattgctgcattttgcgggtatatacattaccacaatgatctgtaacttctactcttatttcggaatccttcgtttcaggaaccgcataaaacaagtgttcggtaatgtccgctcccaaatacttatgtttgaatgtagaactgtttttctcgcagtattcataaatagcaggatcgtatccggaaaaacgggtcatttcccccttgtcaataccattttcataccatttcactttccaggttgaatcgtaattccaaacatttgctacaactgcctcctttttattacgactggcacctaccggataaagctcgaattgataatctttgtcttttcctacacatttgtaataccaattgactttacctccgtcaaactcgtaaacggcatatccgcctggagttccgtcacaagcccagggagcttgccaaaacagtgttgataagggagcatgtacatgttcgtaaagattgtctgccaaaacataattttcattatagtgctcatgtcccgacatgatatgggcattgtaaggttttagcaactcatacaaatgagaacggttgttcatgactttcatagtagactcttttccccattctttccgacgtgcttctcttgaatatgtaggaatatgcatggcaactactactgtagatcccggagtgacttgtttcaaatcctgttccagccactgaagttgctgctcggtgagataaccaacatataaatagctttttgcaataaagaaaatatcatcaagaacaacataatgtatatctcctctattaaatgaataataagtgggaccataataagatttgtaagtaatacgggcatgttcattagaacgtacgtttaaatctaaatcatgatttccaattacatagaaaaagggaatttccgtttcagctattgcatctatcatcggtgtaaagtaactgggctttttattgatgtcaccgataatgtctccacagactattccataggcaggaatcccctgataattagttgccaacagttcttttacatcttttgaagcctgctgtacttgtggcatttcttcatcgaaatagacttgtgggtcagcccataccaccaaaacgtgctttttgttgtcagtagatgatggtgtcagttcaaaatcaatatgcactttttttgaaggttgagcaggtactttttgaaagaacgcaggaactttacctttcatcggaatattatagccatcaggaagggtgatgtaaatgtattctgcattagaggtacttgatatggaatatcgtcccttgtcatccgtaaggacaatttgtgtaccatctgtaacaggtacattagcaattcccttacctccggacagtactttcccataatagaccacgggagtagtgattgcctgcacactgaaacaggaaaaactccattgtaacaagcttaaaagcaataatagtcttaatttcattctttaatcctttctattttaatcaaacgtgtgagaggcttgtttattttatatatttgagttatcaactggtctatttcagcttgccaggcttcacgtatctgtggaaacatggcttgggtataattggtatataaatacttcactaaatagtgactttctcgctccgctttggcagcatcaagagcagctttattatctgcgaaaagtaatcctctatgcttaaaaaagacatactgcatagccatatactggcgtaaacgtttttctatagcacatctttcctcattcagatacatgatagacaggctctgttggtattggggcgtgcatgttatttcagccagattaattcctttactcaattcattgccgtcccagcgtcctatttctgttccatcaatagtcactcggaaatttccatgcaaatcggtcactttcattatttcctgattcatttcctgcataaagggaacttgtctgacagcatcccgggctgtaccttttgttccccaacgaggaatagtgtcgacaggaaagggcaaagaacgggataaatagctgaaagatattgtgtcattttcgttctttatgtgagttattcgacaatttctctcttccattgctttcctgttagttgcattgatatgaaaataagcgacttcttttcctgcaagcccctgtgcttttaagaacaaatacgccattaccatgtggccgtctttatccggatgaattctgtcacctccacagaaagtagctgtagaatcagactgctgaatctccttattcagctcacacatcactgtattgaaattaacaaatccccatcctcgcttttgggcaacttctgcttgcatttcaataattcttttgatcgtctcattctttccatgtaaagtttccactccttccaatttcacattctcatcataaggagaagaacccaaaagtactacgttttttattttcttgtctgcaagaatctgctgttgtagttttccaaactctgtgttagcgtattctacctgtttattcgcgtacttatcatatccgggcttattatatccgtcatatccggaatcattcattccgaaggaacaaaccagataagttggctttttaattttaatatctgaatcgaaacgaaaaaccatgtggcttgcacaatcgccaccaattcctccattataaatacgaagaggcaattcggggaaatgcgtcatataatacagccatatataagaatgataatggcctccttccgttatactatttccgagaaagacaattctgtcattggctttaaatgatggaatttgctgtgcacttacgggaaacaataaaatgcaacaggtatataatatgaatagtatttttttcattgctcaatctttttattcaataggagtcagaattgctgcccaaccaccgcctttggccattgtgacattgatcgaatcaccttttgaaactattacctcttctgttttaaaatccgatgcataaacatctgcgttcacaccatctttgaaaacttccattttatatttgtctgcctcaagaaaattcagttttacttcaatgctgcgggcattccagtctgtcaggcctgccaaataccaattcttcccatttttacgagcaatcaccaattgttctccgattttggctgttatcgctttggtatcgtcccaagtggtaggtatacgggagataaaggaagcaaattcaggagctttataatagtttgaaggagaatctgctaacatttgtaacgagctttcatacactacatataaggctgcttgatgggcacgcgtacctaaactgatcggatgcacgaaattgatgtaaaaatcttctgctgtcgcattgtttactgcaccaggcgtataatccatcggaccggctaccattctagtgaatggaagtatcaggtcatgtaccggattaatatctcttgaatctttatcgtgttctaatcccagtacaccttcaaaagtcatcacattggggtatctcttttgtaagccggaaggtttgaaagaaccatgaaaatcaacgagtaatttacggtccatagccgcttttcctacacgctcgtagaaattaaccatatattgatccgaacgttgcataaaatcgacttttatacctttgattccccatttttcataaatatccagaattccttccaaatctttatccagcgggttccacaaagtccataatacaagaccaacgtttctttcctttccatatcgtacaagttccgggatattaagttcggggattgcctctttaatattccaagtcccggctgaccatccttcatctaataaaatatattcaattccgtattttgaagcgaaatcaatgaaatatttataagtatcagtattcacacctgccttaaaatctactccatatacattgagtgtactccaccaatcccaagagatctttccgggtttaatccattctgtatcttgagtgacagatggagaggccaattgatatactaagttgttttcaattactgctttatcatcctcgttaatcattaatacacgccaagggaaggctcttgttccttcagtctcagcgatgtaagaggccttctccagcaatacttcatcacggtcagtaccttcttttagtgcactttttaaaactacaggaggaaattcaccggatagcgtgttattacgatcacccgttaaaaatagattgggataatcgaaaagatcggattccataataacaactttcgttcctttaggagtagagaggtaaatgggtagatagcctttcatatccttagtgagcgaggagatgtttaattcatcaaaaatggcttcgcagtgtgtgaggtattcttgattcttttctcttggccaatatagcttacacccttcagtccagttctgttcaatagtttcggtattaataataactttaggttgctttaatgaagtctcaaaacgataagcggctccattgttatatactctgaagactattgcgtagttacctttacaagtcagagttaactggttatattgatctttgataattctttgtttaagtggaatgacagctgtttgctccgaatttactttaagtgttttagcttttattactttcggatttactcccggttgttcagtctgcccttcaatatccatctgcatcagactgggatttagtatacgttcaccattgtaattaatactccaactcaattgttttccggctgttaccgtcaccttgatttttccatccggtgaacttacagtgtagtttttggcttgagttactatgcatgtgcataaaataatgtgtaataatataagtactcgtttcattttatatattatattttattgaatattctctatttaaagactctctgctcgttgaattccttctttaatgggtgtccattgattgaattctattacttgcacaatgtcaaacaccattaatccttcggattgggaaagacagacataaacagcatctgctatattgtccttatgatttaaagcatacaaagtgccatagactttacatgctccatgaacaatgcgttgtgcacgcgctattccatattctatggattcgggatcgttcaatccaaatattttggttaaataagttccacatagaaaggtgtctaacaatccggcaaaacctgtatttttatattcaggtgaagcccaactgtattctttggaaaaatcgtattcggtggatgcccaattttgtccttgcccataaatagcatgaatccatgaggcagcccaatattctaattgaatatccggtttaatgtttttaatttctgtgcgcacccgttctacaaaattacgtatgaccatagagcggaactcccaccatttcttgtaataagtccctgtccgtttagtgccatctgtattccaaatgaaaatatcatccgggaaccgatctaattgctttccgatgtattgttcgaaagccgtttttgttgcctccgaaaaatcactttcatctcccggataacggcaatagtctaaggcaaaaccatcaaaattgtaatttgtaactaactcttttataaaattcagacaaaagtcttgtacttccggtaaaactgggtttaaaaaggcggagacttttgttttatcgtccttaatatctatcaaaccctgatctttggtatattccaaacaagtttttccatcccatgtatcatcacggtacgccataccatttttagaagaaggtaggcctgccgtaaatatagtagcagagaccgtaactttaagttcacgtttatgagcctcatcaataaaaaattgaagataatcccaatctctttcgatatgtgtatcggcaagatcggtcaatggggttaaataggaacttttaaacagggcatcgccttgtacaggacgcacatcgactacaattttattaaaacctgttgatttggcgagatcaagataatatgtgatattctctttttttgagaaacgttcaaaatttgcttctgcatcaaaccagagcattttttctttttcaggagttggttcttccggaatgacaggagtgggaggatttggctcgggaagctcggattctacagtctttgtagaacaactactaaatgatagaagaaaaaagaataataaaatgcttggaatgtatttcatactttattgtttttatttcccgacttcaggctgatatttagaaaaaaatacagtctgaaatcgagaataataagaaagctaaataaaataaatttgttatcctaaagatctttcgaccgttattttaaagctactgccgtagttatagcacgttgggcaccagcacttggctttatcaccggttgaccgttgaccaacatacaagttgaaccaccaccatcaagattcatagcatctacacaacctaagctcttcaggacattagccatcatagccatattcataccttttacaccttccgttacactgcggccttcacaaacgaaaaatatcaccttattattggctgttattccgatagcggttcttggatgataactttcgggagcaactccactttcttcatcaaaaagttcttcaataaaagtatttctcacacttccgtctttcaacaggatcggtccacctccaatcgccgtttctgcatttaatttcacgcctctcgtcggaaaataagccgaaggtgcaggttgaggctcataaccggacttattgggagaaggttgttcataggtatatgtcacaccatcagttgttgtataagcccaatctgtggagaaatagccattctttgacagctgaaagatacctcgtgtaggataataactcttttgagaacgtatttcctcctgcgagttcacagctaagacctctccttcacggcatagcaaactgacagacttacctgctcccattacaaaatatccaccattcataattatcggatatttttgttgttctgcttgccagatttgattgggagtcttagaatatatcaggtctcctatagtcgcaaaattagcttttgacatatccgcaacagcaataaaagctatggctttcatgccttccagttctgacggagatttgtatacacttatgtattcaggtaatgtgccaaactctgttgtctgtttaacccagcctaatgttgtcggatcaggatccggcattaccaccttttcattatcatcatctgaacaacttgtcgcagacatggcggcaatcatgaaaagaagccaatattttgatatatttttcattatcatatcgatttgatcgtaaatatttatttctagttatctttgtgcttccgcacgttctatacctttttggatatcatcccacagattcatttcaataacctgtactatgtcgaatatcatcaatccttccgatttctcaagacaaagacttactgcatcggctatattggttttatgatttaaagcatatatcgttccgaatactttgcaatcattaccaaccaatctctgtgcacgggcaataccatactctatagattccggatcatccatgccatagatacgctctaaatacgttccacataagaaggtatccagataaggtgcaaatcctgattcattgtaggcttccgatccccacggataatttaatgagaaatcagattttggactggcccaattctgcccttgtccataaataccatgaatccaggaagcggcccaatactctagctttactttattattgatagaatgaatttctttacgtacctctttcacaaaactagtgataacattagcccggaatgcccaccattctttataataaattccaggatttttcgttccatcggcattccaagtgaaaatatcgtctggaaagttccggactttttttcctaagtaatgttcaaaagctttacgactgtcagcagagaagtcactatcatctcccggatatcgacaataatctaatgcataagcatcaacatcatagtttctcactatttcacgaacaatacttaaagcaaatttgcggacatctttacgaaccggatttaaaaaagctcctacttttttcttatcctctctgatgtcaagcatctttccgtcaggtgtatattccaagcatgttttcccatcccaacgtgactcatcatagaccagaccttcgcgggtagcgggatgtccggacggaaacattgcagtggaaacagtgacttttaatcctaaccgacgagcttcattgataaaatactgcaggtaatcccagtcacgatgaattactttaccattcactgttgtaagtggaggtagaattttacttttatacagtacttccccgtatataggtttgacgtctactaccacttgattgaatcctactgatttagctttttccaaatagtaagaaatagaatctttagaggcaaagcgttcaaaattagcttctgcatcaaaccaaaggtatttaggttgttctttgcccctgttcccggcaaaggaacaggtagcaaataacaatagaaaaaacgatataatgcttttattcaacatatttcaattctatataattaggagtatgcctatttctcgtattttgtaagttcataacaacgaatacctacaccataaccgtaatagagatataatgattctccgtcatcacttggtgaacaagtagtccagatacaagagttggtagtccatggctcaattgtttctgtgataggtaatgaatgattactagacgggtctagcaggtgcagtccaacccagccccaaccacaagttatggttgctccgtaccatctgccattaaatggaatacctctaccggaaataagtacatgatttccccagccagcgtatcctttcttattccacatgtctatatatggacctgtgatgctgctaaatgcccctgccgtatttgctttataaccgatttccggtcccattacacctccggcattcactgcgtctattacgtaaaatggtgggttatccgacatgccgagtacagccacaatctgtcgccagttactatcattactgggacgaccggtaaccaaggttgaagtgcctgtatatgtaccattctcaaatttgtaaactgcatgtgtacctacaccatcaggtttagaatcataaacatatcccactttgtcaatatcaccgattgcagaaactttatttgctccgggagttacattagcaaccttttgtggagctccctcaacagtagtccatctgtataatcctacattttttactacaccgatcaaattaccggcgtcatcattgactaactggcacaaagaagcgtctattcctgtcacattcaaagtcttatctactttctgccctgtatatttatcatagaaattaaattgggtgtctattatataattaccaaacactgcaccgaaaccatctttgtttttattagatggagtgggtacactaatttcccattttttgaaaaaatattcaaaaccttctccatcatttacttttccgccataagtccattttacggtccagtcagtggttgtgccatcttgcgccttcactgtgtaatgtacatcttttgaaaaatcttgaggtacatcgggggtaggtgtaactgttgcatatggagagataaagaaagaacaagtaactccattgagtttgctcaaatctaagtccggagtaatcttaaattcaataatgttaccatccttaacggtaccctgtttataattaccctcgcccaatctaactttgaatccggttatatcagtgtcagagtataatgttggattatccgagcatgcggaaaatgcaaccattgttgccatgacagcaacttgaagccaattatgatattttattttcataacatctacttttttaattatttgggtgtttagcaatcaaagtatactccttttgcgttccatcacctgctacaatagttagtttaaatggagtagataaatctttagcaccagtcaatgaaggataagcaaatgctgctacaggcaaattggctgttatatataattcgctcaatttcacttttgccggaagttcgaaagttatatttccattctctgatatgaccccatcataagtagtaccatcttccggagaattagcacgaaccataatggatatgatatcacaatcagaatgataatggatatcatcatgcttttcacaagaagaaaaggaaaagctaaatgctatcattaatatgatgtatgtaattactttaaaatttttcataactataataatcttttaatattaccaaggagcattattctcacataacggattattctgtaattcatctacaggaataggtagcaagtaatagcgttctggaaagaagcggtttatattgtcgtcacatgacacttgttcataagtataagaattatcatcttttttggttatttttgttccatgtgcttgttttccatcaataacttcgccagccaaacgccatctgcgtaaatcccaataacggaatccttcaaaggccaattcacaaatacgttccttacgtaatagtttcataaatgagtctttatccggtgcttcctgtgttgtacggtccggtaggtcaacacgtcttcttacttcattgagagcttccagggcatcatcctgatttttagcataatcctgttctgccagagcctcagccagatttaacaaaacctccgcataacgcatttcaatccaaaactgatcgcttcccttatcatcaaattcggtattgttttcttgtagatattttctgatgaaatatccggtaacagtttgtttttctcccggattcatgttatctctgtaagcagcaaaaccgttttctgcgtctacataggtataaatagtcttttctttccaagtagccccattatatataatggatgcatagaaacgaggttcacgacctacataaggatctttggccatggagccgctccacgagaaaggagttccgtcagccatatcataagaatcaaccagttcacttgtcgggacagctcttcttattccttgtttaccgtcaggagcaaaatagcgatcgaaataatggggcatatccggaattttgtatgctatggagaaaataatttctttattacctgccactttaaatacatctttatattcatccattaagtcatacttattgagttttttaatctcatcagcagcggtaatagcaatatcccaacgttttgcaaagagtgctgtacgacacatataggcatacgctgctcctttagtcaaacgcccatcccatttgctgtcccattctttcggaaggtgtttggctgcgaattccaaatccttcagaacaaaatcccatgattcggcttcagttgctcttgcttttgctttttccccttctgaatcaactccatttgtttcgtcacgaagaataactcctccgaaaattctaatcatacgtgcataattcacagcgcgaataaaacgaatttcagcaatacgagtattgagaaaatcttcactaaacttacttccatagataccggcatcacgcagaaatacattttctctaaatatgtcagtataaagtccccacgatgacatcggattattatctgatgttattgtgttttgctgcaatagaatcttgttatgagcactccatgtttgtggaactccatttccatacttaactaaatctgtatatccatcggttaaggataaagaagaaaagttggataagccattgagaggcttatataagtaagtcacatacatatctaaagaagattccgagctccaggctactgtttctgaatatgagtctgtgggatctttctccaacaaatcatggcacgaggttagaaactgtgacgtaaacatcagccctatccctaatagatataatctttttattttcataattattgatttaattagaatgtgatatttaatccaacactataattcttttgttggggataataaccattatttataatagccatttcagggtcgcaatatttaaattctgtgaaagtaaacagattggtgcctgctacatatacacgaacgttagatagtccaatattggctttcgcaagtatttttttaggaattgtgtaaccaaactgtaaattcttcaaacgcaggaaattaccatttaccaaccaccaagaagaggtatatgcattatttccgttatgaatggcacttaatctgggataacgggcgctagtattttccggtgtccatgaatcttctaccagataataaggagcatttcctcccgagtagaatggtcgtgtatagaccgtattgtccattgaaccatgattataagtaccattcaacgtataactaacaatagcagctccttgccataatgcactcaaattgaaccctttccagttgaagtccatagacagagagtagtttaactctggtaaagtgctgtggccgattttaactttatccccatcccgcgtaattttaccatctccattgatatcctcatacatgatatctcctaaacgttgaactccattaccaacaaaaggacggttatccaattgctcttgtgtttgatataagcctatagctttatagccataaatttgtcctaaaggttcacctatgtttgtccggtaccaaggagtactttcactttcaatccgcgacagaactttatttctagcccacgctacactaccggttatactataataaaaatcattaacgtggttttggtgcttcaataccaattcaaaaccgcgattgtcgatcttacccgtatttcctttttgagcataatttcctcctaatgaaggaggaaaaccgccactccggctttcttgtatatcttttgtcagcttataaaataaatcgaattctactcccaataatccattccacattgtcaggtcagcaccaatattgtaactgcgggtagtagaccaggttaagctggaagtaatagagttggatgcacctaatcctgcataaggaactcctccgaatatatacgcattcttctctaccttaaaaatgcttctatgcaaaaaagcatctgtattatcactacccaattcaccgacagaagcacgcaactttaacaggttgatagaagagaaattgttttttatgaagttttcttcagagattacccatcctaaagatacagaagggaagaatccccatcttttatcttttgcgaatttataggatccatctacacgaaaagcaaattctacaagatatcttttatcgaaaatataattgaaacgccctacataaccaatagtagctttatcgctatgactacctgtaggattggatataaattcagtacctaatgaaagatcaaccggatcattaaaattatagccgcccatctttcctgtcattgtagagcctttcagttgtgtctgttcatataagaatagggctgaaactgcatgcttgccaaaggtattagcatactccacactcgggcggaccataaatcttctgaaagaagatgcagatttagtgtaattacctttctcgcttgtagaagaggcacgcattaaattatatgatttagaatctgcactataagcattaacattgtatcctaccaagaaaccgttatcttccgaataactagtatcataaactaaaccgagagaagctttcaacccttttacccaaggaaaggcataactaattttcattgtaccatcaaactcatgtctttggtttttctgaaatccgctattccttaaagtagcgagtggactctgtgtggtggaactaccaggaccaatccaagctgtatattctccttgataataaataggaataataggggctgaataaacagtctgctgaatgggattttgttcagcctgtgcgcttgtgctaattccgggccagttcttttcttcataaaagccagaaatattaagttcgaacgttaaatctttggtaatattaccttctacgttagaacggacattgtaacgatcataattcacattttcgatgataccggattgatccaacatgcctatactggtgaagaaacggatattcttgttaccaccggaagctgaaatattatgttgatgtgtgaagccataatccttaaaaacttcttttgtccagtttgtatttccatatttaccttccggatcatagttgttagccactttcgtctgaatatcagctccataatatggcccgttaccatcaagttcacttgccttattataccaataaatatagtcaggaccatttagcatttcaggcatggctgtatttttctggaaagtaacagaaccgtcatacgaaagagttactttaccttcagtacctttcttggtcgttaccaggattactccatttgccgctgccaaaccataaacggatgctgtagctgcatctttcaaaatagatatgttttctacatcattaggattcacagtattcaacatacgttcaacgccatccactaatatcagaggactagaatctaaaaaagtacctaaaccacggatgttgatagatgtctggtcgtttccgggaagaccggaacgttgaacactcgttacccccggtaacttacctgtcatcatattagaaagattagcttgaggagccatcatcaactctttagagcctacttgagaaacggaacctattaagaatttctttttttgagttccataccccaccactacaacttcatccaatgcttgtgcatcttcttgaagtctaatagtaatttctgaacgaccatgtaaagcaacctcttgagtctgatacccgacaaaggaaactactaaagtcgattttaaatcctgtacatttaggctaaactgtccgtcaatattggtaatagtaccgttggacgaattcccttttacactaacagtagcaccgacaagcggctcattgtttgagtcatacactgtccctttcacgttcgtgtttttttgagcatgaacgtttaagaaagaaagcgaacagatgaataaggctataaaccttatactccatgtgatttgtttctccatattaaatattaatgttaataaaacaagatagttatttataattcatcaaatcttctaatgttttccagcactgatacagtcctcttggcacatggaagcatcctttccattttcctcctttgagtggtagcaatacttcgcctcttcggttcaagtagccataccattcaggatattctttatccttgaaatgctcccaagtgtagtcatgtaccttttcaaaccattccaagcattttttgtctcccgtcaattgatagcctttcagcagggaaataagcgtttcgatatggacccaccagagtttctggtcccactccaattgttggggaggacaaccgttacgatccataaaatagtagatacctccatattgcttgtcccagccataattaagcatcgtgagagtagtctctttggctttctctatcaattccggacgattcagacgcttgcctagatccatgataaaccacatcgcttcaatggcatgtcccggggtcacctgacggccttcaaaacaatcgaccaaattaccgtctatgtccacgttttcaacaatgatacctccgagttcaggacgatagaaaacttccatcacttcatggatacaagtatccattgtttcccgcagatacatttcatccaataaatgctctatctccagtgccaggttacagaggatcattggcaaggcaaagttcttcagattacgggtacccggatgaagcttattccatctccctttcggattatccactttggaaaggattatgtcgaaagttttcttggcaatgtccgcatattcctgattaccggttgcaaggctcaactgtccgaaagccatggtggcgaatgtatacgagaatatattatacggttctaccaatggtctacccgaacgatcaagggaaaaataccagttatagtaactatcatgtccgtatttttttagaaattcaccaccttgaacggcacaatccagccattccttgcgtttttccactttattgtaaagcatggagaacatccacacctcacgacattgcagccagatgaacttatccgtatcgaacacttttccttcacggtccagacaggtgaaataaccaccatactcgtggtcttgggagtgttcaagccagaaagggaggacactgtccagaagttcatccttgtacagacttgccagtttctcgaaatccatactattatttccattatagattggtatgggcaattcagcagtgaaagagatgtctgctgaatgaccaatgttgttcttactatccatatttataagatgttagtttattgttattaaggtctgttttatatttattccgaacgggtccaatatctttcaatctcttccagcgacttccctgtagtctccggcacgagtttccagacaatcagcatatacggcacgcacatgagggcgaacaggaagaatgttccggcgggggtaaggttctggagcatccagggggttaactgtccgatcaggtacgttccgatccacagagcgaatcctgctatcgacatggccagtccgcgaaccttggtgggatacatctccgagagaagtacgaacaccacggcacagatagatacggcacagcagaatacatagaacaggaagaaaacaagcaggaagaggctggatactcccagggaatctccgaagaggaaatacaggccgatgagaatcagagaaacaaccattcccgaaactccgtaataaacaagtttcttgcggcctaccttatcaatgatgacaagagccagaatggtggtcaaagtattgactagtcctaccagaacttggtaaaatgaaagttaactgtttgcatagctgtattatggtagaaaagttttatctttatcgcgttaaactaactaatacccccattatgagaagaattttttatttacttttccttgtcttattaggctattcttttgacgtaaaagcttcagacacagtgtttatccatgaaacacaaatcccggttttgatagagcggcaggacaatgttctgttctatatccggttggatgcaaaggaaagcaagatgctcgatgaagttgttttagatttcagtaaaagtaccaacttagcggatgtccaggcaatcaaactctattatggaggaacagaggccttacaagatcaaaacaaaaatcgctttgcccctgtagagtacatatccagccatcgaccgggtgcgacattggcggctaatccttcctattccataaaatgtgcagaggtcggaccatcggaaaaagttgtattaagaggtaattacaatttatttccaggtgtcaactttttttggatcagtttgcagatgaaaacagatgcctctttgcatactaaaatagtctctgatttacatgctgtaaaagtggatgggaaagaactctattgtaaatttatttccccgaaagatattactcaccggatggcagtcggagttcgtcatgctggtaatgacggttctgcttccttccgtattcccggattagtgacaaccaataaaggaacattattgggagtgtacgatgtccgatataatagtagtgtcgatttacaggaatatgtagatgtgggtttgagtcgtagcactgacggagggaagagctgggagaaaatgcgtcttccgctttcatttggtgagtatggcggtttgcctaaagcacagaatggggtaggagatccctctattttggtagatactcaaacgaataccgtctgggtggttgccgcatggacacatggtatgggtaatcaacgtgcctggtggagctcccattcgggaatggatataaaccataccgcacagctggtattggcaaagagtacagacgatggtaaaacatggtcgaaaccgatcaatataacagagcaggtaaaagatccgtcctggtattttctccttcaaggacccggacgtggaataacgatgagcgacggcacattagtatttccaacgcagtttatagactctacccgtgttccgaatgcaggaatcatgtatagtaaagaccgggggaaaacgtggaaaatgcacaatatggcacgaacaaatacaacggaagcacaagttgcggaaatagaaccgggagtattgatgctgaatatgcgtgacaatagaggaggaagccgggctattgccataacgaaagatttgggaaaaacctggacagaacacccgtcttcacgtaaggcacttcaggaaccggtatgtatggccagtctgattcatgtcgatgccaaggacaacgttttgaataaagacctcctgttgttttcaaatccggatacgactaaagggcgcaatcatataacaataaaaacaagtctggataaaggacttacctggttgcccgaacatcaaatcatgctcgacgaagcagaaggatggggatatagttgcctgacgatgattgataaagagacaatcggtattctatatgagagcagtgtggcacacatgacttttcaggcggtgaaattaacagatttgttaggaatgaaatgatagatataatagcggttaaactatccgatatgataaaagaataaaaccgtatatttatcgtggcgtgcaaaaacaacatattttgttaaattatcagtgaaatttgctgaaaaaataatatctttgaatccgttaatatctaatgccccactatgatgattaatttgatcggaaaaaaggctcaaatagcatgtgaactactatgctgttgcagtatggcatatgcacagagcaatgacaattccgaagttgtcgttctaaatacaggctgggagttttcccaggcagggacggagctgtggcgaccggcacaggttccgggcaccgttcatcaggatcttatcaaccataaacaacttcccgatcctttttatggcatcaatgaacaaaagattcagtgggtggaaaatgaagactgggaataccggactgcttttacagttacccccgaacaactgaaacgggatgacgcccaattggtttttgaaggtcttgacacatacgccgatgtatacctcaatggagcattgttgctgaaagccgataacatgtttgtcggttataccatacctgtcaagtcccaactccgtatcggagaaaaccttcttcacatctattttcattcccccatccggcagacactgcctcaatataactcgaacggattcaactatccggcagacaacgaccatcacgacaaacatttaagcatattctcccgtaaagccccttacagttatggctgggactggggaatccgcatggtgaccagcggcatctggcgtccggtgaccatccgtttttatgacgcagcttctatcagtgactatcacgtaaagcaactcgcactgaccgaccagctcgcaaatctgtctaatgaattagaaataaacaacatactctcccggccacttcaggcagaggtgagaatcaatacctcattcgaaagaagtgcagaaaaaagcatcagccaggcaatcaccttacagcccggaatcaatcatgtttccataccttccgaagtggcatcccccgtacgttggatgccgaatggatggggaaagcccgccctgtatgatttctccgctcaaatcatagtagaagataaagtcgtagccgagcaatcgcaccggataggactgcgtactgttcgcctcgttaatgaaaaagataaagacggagaatccttctattttgaagtaaatggtgtacctatgtttgccaaaggagccaattacatcccccaggatgcactcttgactaacgtcactaccgaacgctaccaaaccttattccgcgacatccgcgaagcgaacatgaatgtcattcgtgtatggggaggtggaacgtacgaagatgaccgtttctatgacctggcagatgaaaacggaatactggtgtggcaagacttcatgtttgcctgcactccctatccgtccgaccccacctttctgaaaagggtagaggcggaagcctgctataacatccgtcgccttcgcaatcatgcttccctggcgatgtggtgcggcaataacgaaatactggaagccttaaaatattggggattcaacaagaacttcccgcccgaaatctatcaggaaatgtttcgaggctacgacaaactgttccatcagctccttccagccaaggttaaggaactggatgccgatcgtttctacatacacagctccccgtattttgccaactgggggcgtcctgaatcctgggggataggagacagccataactggggagtctggtatggtcaaaaaacattcgagtcactcgatacagacctgccccgtttcatgagcgaattcggttttcagtcctttccggaaatgaagaccatctccactttcgccgctccggaagattatcagatagaatcggaagtgatgaatgctcatcagaaaagcagcatcggcaacgccctgattcgtacctacatggagcgcgactatatcatccccgaaaaatttgaagactttgtctatgtcggactagtgctgcaaggacaaggaatgcgtcacggactggaagcacaccgccggaaccgtccttactgtatgggtaccctgtattggcaactgaatgacagctggccggtagtatcctggtcgagcatcgactattacggtaactggaaagccctgcattaccaagccaaacgagtctttgctccaatcctcatcaatcctatccagcagaacgacagcctcaatatctacctgatttccgactgtccggacaccaaagaccacctgatgttggaaatgaaagtaacagactttgacggaaagaaacaaggcaagcctatacaactcaacacattgacagttccggctaacacttcccaatgcgtgtaccgtataaaacccgacacctggctatcaccggaagaacagcaacgctgtttcatgcaactgacactgaaagacaaggcaggaaacacccttgccgaaaccgtatacttctttagaaaaacaaaagacctgcttctgcctgaaacaaccgtttcctgcaagatgaaacagaaagacggcatgtgtgaactgacattgttttctcccgctcttgcaaaagatgtctttattgaaattcctttgcagggagcccgtttcagcgacaactttttcgaccttcttcccggagaacgtaaaacggtcgtcatcacttctccccaaataaagaaaggagaggagctgcctttgacaatcaaacatattcgtgaaacttataattaatctatttaataacttaacacttaattttttagtttatgaagcaactctttaaattaaccggatgtctggcactagcaggactttttgcctcttgccaatcggcgcaacaggaagccaactaccagatcatccccatgccacaagaaattgtaaccgctcaaggaagtcccttcatcctcaagagcagtttgaaaattctctatccgggaggaaacgagaagatgcaacgcaacgcaaaattcctggcagactatctgaaaacggctaccggaaaagatttcgctattgaagccggaacagaaggtaaaaacgcaatcgtactggcattaggcacggagaacgaaaatccggaatcctaccagatgaaagttaccggtgacggaatcacgattaccggtcctacggaagccggcgtattctatggcatccagtccctgcgcaaatcattgcctgtggctgtcggtgcggatattgccatgccagccgtagaaatcaatgacgctccccgctttggctatcgtggcgcgcatttcgataccagccgtcatttctttaccgtggatgaaataaagacctacatcgacatgcaggctttacataacatgaaccgcctccactggcatatcaccgacgatcaaggttggcgtctggaaatcaaaaaatacccgaaactgactgaaatcggtgctaacagaacagaaacagtcatcggacgtaactccggcgaatacgacggcaaaccttacggtggattctacacccaggaacaagccaaagaaattgtagattatgcagccgaacgctacatcaccgttgttcccgaaatcgaccttccgggacacatgcaagctgcccttgccgcttaccctgaactgggttgtaccggtggcccgtacgaagtatggagacaatggggtatatccgaagatgtgctttgcgccggaaacgaccaagtattgaaattcttggaagatgtttatggtgaattgattgaaatcttcccatcacaatatattcatgtagggggcgacgaatgcccgaaagtaagatgggaaaaatgtccgaagtgccaggcacgtatcaaagcattgggattgaagtcagatcagagccacagcaaagaagaacgtttgcaaagctttgtcatcaaccatattgagaaattcctgaacgaccacggacgtcaaatcatcggttgggatgaaatcctcgaaggcggacttgctccgaatgctaccgtgatgtcatggcgtggtgagaaaggtggtatcgaagctgcgaagcagaaacacgatgtcatcatgacaccgaacacctatctgtatttcgactactaccaagctaaagacatcgaaaacgaaccgttcggtatcggtggttatctgccgatggaaagagtgtatagctacgagccgatgccggcttctcttactccggaagaacagaaatacatcaagggagtgcaagccaacctctggacagaatacatcgctaccttcccgcatgcacagtacatggtattgcctcgttgggctgctttgtgtgaaattcagtggtccagccccgaaaagaaaaactatgccgacttcctgtcccgtcttccacaactgattaagtggtacgatgcagaaggatacaattacgctaaacacgtatttgacgtacaagccgagtttgacccgaatccggcagaaggaacaatggacgttaccctgtctaccatcgacggtgcccctgtttactatacattagacggcacagaacctactgccgcttcctccgtttatgaaggagtattgaaaatcaaggaaaatgtaaccctgtccgccaaagccattcgtcccaacggcgaaagcaagatagtgacagagaagattgatttcagcaaatccagcatgaagccgattgtagctaatcagcctatcaatgaacaatacctgttcaaaggagcttccactttgatagatggtctgaaaggaaatagcagctataagtcaggccgttggatcgctttcaacggaaacgacatggatatgactatcgacctccagcaacctactgaaatctcaagcgtggcaatctctaccaatgtagcaaaaggggactgggtatttgatgccagaaacctgtccgtagaaacttcagatgatggcaagaccttcaaaaagattgcttccgaagaatatccggagatgaaagagacagacaaagacggaatcgttgagcacaaactaacctttgctcctgtgaccacccaatacgtgagagtcattgcttcaccggagaaatcacttccggcatggcatggaggaaaaggtaaaaaggcatttttatttgtagacgaaatcaaaattgattaatgaatataagaaaagaataccctaaagtttgtcttttcttatggatattggggatgtgcttccatgcacatcccattctggcacagtccttcatacctgtcccattaaaaatggagcaggggacgggctcttttttactgtcagaaaagactaaactttatacaaacctgcaaggtggagaagcggaactctgggagaattacctgaaagcattacctgttcagctgaaagaagcgagaatgaaagacaggaaacagatgcttttcttattgataacccccaagaccccccaattgccatcaccggaaagctatacactctccgtcacctctcaacgaatcgagatccgggcaacttcgggagccggattattctatggaatgcaaaccctgttacagctgatgcaaccggcaagcacaggcagctattccgtaccctctgtcgagatagaagacacccctcgttttgcttatcgcggactgatgctggacgtatcccgtcatttctctaccaaagagtttataaagaagcagatagacgcattggcatattacaaaatcaaccgtttgcacctgcacctgaccgatgcggcaggctggcggcttgaaatcaagaaataccctttactgaccgattttgcagcctggcgtacagaccccacctggaagaaatggtggaacggcggacgtaaatacctccgttacgatgaacccggagcttccggcggctattacacccaggacgatattcgtgaaatactggaatatgcccgtcagcattacatcacggtgattccggagattgaaatgccttcccattcggaagaagtgctggctgcctacccgcagctatcctgttcgggagaaccttacaagaactccgatttctgtgtcggtaatgaagaaactttcacctttctggagaatgtactgacggaagtcatggaacttttcccttccgaatacattcatgtaggaggtgatgaggccggcaaatcggcttggaagacctgtccgaaatgtcagaagagaatgaaagacgagcatctggccaatgtagacgagctgcaaagctatctgatacaccgtatcgaaaagttcctcaacaatcacggacgccgtctcttgggatgggacgagattctgcaaggaggtatcgcgcccaatgcaaccgttatgtcgtggcgtggagaagagggtggtattgctgccgtcacctccggccatcatgccatcatgacaccgggtgcatactgttatctggacagctatcaggacgccccgtactcccagccggaagctatcggtggctacctgccattgaagaaagtatatgcctacgatcctgtccccgcttccttaactgcggagcaggcaaagttagtctatggtgtgcagggtaacctatgggtggaatatatccccactcccgaacacgtggaatatatgatttatccccgtatgctggcattggcggaagtagcctggtcggctccggaacgtaagtcgtggcccgatttccatacccgcgcactgtcagcagtggccgatttacagaaaaaaggataccatcctttcgatttgagcaaggaaatcggcagccgtcccgaatctcttcaaccagtcagccatttggcgctcggtaaaaaagtgacctataactcctcctatagcccccattatcccgcacaaggcaacacagccctgacagacggcatacgtggtgactggacttacggtgatggttcatggcaaggatttatctcggacaaccgtctcgatgtgacgattgatatggaaaaagaaacccctatccattccatcaccgccgcttttatgcaagtggtcggcgcggaagtattcctgccggagacagtgattatttccatttccgatgatggaattaacttcacggagttgcaaaaacaacactttgaagtgagcaaagaaacccctatccggtttacggatatttcatggcagggagaagccaaaggaagatacgtacgttaccaggcacaggccggaagcgaattcggagggtggatatttacggatgagataatcgtgaaatagacattgtcaatatcatttatgaataaaagagggaatctattcaaccagattctctctttttttgttatatttgcattattaccttaaaaactaagaatatggtacaacacgctagactcattttctacacccttcttcttctggtaatcccgtgcgagagcaccttggcgcagaagattcccgtcacgcccatagactcattgataactgttggatatgccaccggaagtttgaaaaccctctccggttccgtagagaagattacggagacacagatgaataaagaccagataacgaaccctttggaagcaatccgcggacgtgtgccgggcttgactatccaacgcgggtcaaatggtccggcagccttggatgcagtacgcctgcggggaactacctcactgaccagtggcaatgaccctttgataatcgtcgacggagtatttggtgacttgagtatgctcacctccatttaccctacggatattgagagcttcaccattctgaaagacgcttccgaaaccgcacaatacggttcacgaggagcttccggtgtgatcgaggtcaccactaaaaaaggaatgagcggcagaacacaggtagcctacaacggtagcttcggaatttccaccgtctacaagaatctgaaaatgctgtccggcgatgagtaccgccgtgtcgcctcggaacgcgggatttccattctggataaaggaaataacaccgattttcagaaagagattgaacagacaggactacaacaaaaccatcacatcgccttttatggcggttccagtgagtccagctatcgcgtttctcttggtttcatggatcgtcagggagtgattctgaatgaagacatgaaaaacttcacttcgaatatgaacatgaatcagaaaatgttcgacggcttcctgaactgcgagctgggaatgttcggttccattcagaagaatcataatctggtggattatcagaaaacgttctattcggcagccacattcaaccccacctatcccaaccataaagaccccgtcaccaattcttgggatggaataacgaccgccagtcaaatcaccaatccattggcatggatggaagtgcaggacgatgatgccacttcgcacatcagcacgcatgcccgtctgactttcaatctactggaagggctgaaacttaacctcttcggtgcctatacctataatatcgtggaaaattcgcaatacctccccacctccgtctgggcgaacggccaggcttacaaaggaaccaaaaagcgagaatccttgctgggcaacatgatgctgacctataagaaaaactggaaaaaacatttctttgacgtgttggcacttgccgaacttcaaaaagaaacctacacgggatattatacaacagtaagcaatttcagcaccgacaaattcgggtataataatcttcaggcaggcgcactccgtttgtgggaaggcactaattcttactacgaccaaccccgtctggcatccttcatgggacgtttcaactatacatacgccgaccgctacgtactgacgctgaacgcccgtacagatgcttcctccaaattcggggcgaaccacaaatggggattcttcccctccgcatctgccgcatgggtgattagtgaagaagaatttatgaagcagttgccgatggtggataatctgaaattccgtattggctacggtctggcaggtaatcagagtgggattgactcatacactacattgaaccttgtaaagccgaacggtgtagtccccgtcggaaactccgccgtcgtatctttaggagacttacggaacacgaatcccgacctgaaatgggaagtgaaacatacctttaataccggtatcgacgtagctcttttcggcaaccgcctgctgctttccgccaactattacaactcccgaaccacagacatgctttacctttacaacgtaagcgtaccgcctttcacctataacaccttgcttgccaacatcggttccatgcgcaactggggtacggaaatcgccatcggcatcacccccttgaagaccaaggatatggaactgaatatcaatgccaatatcactttccagcgcaacaaactgctctcattaagcggtatgtacaacggcgaaatgctttctgctcccgaatataaaagtcttgctggcctcgacggagccggctttcatggaggatacaaccacatcgtatatcagatggtgggtcaaccgttgggcgtgttctatcttccccacagtacgggactggaatccgacggaaacggcggatacacctatggcatcgccgatctgaatggcggaggtgtcagccttgaagatggtgaagaccgctacgtggcaggacaagccgtacctaaaacgattcttggctccaacatcagtttccgctacaagcgtttcgacctgtctttgcaggttaacggagctttcggacataaaatttacaacggaacctccctgacctatatgaacatgaatatatttcccgactataacgtaatgaagaaagccccgaaacagaacatcaaggatcaaaccgccaccgactattggttggaaaagggagattatgtcaacttcgactatgtgacgctgggttggaacgtgccgattgagaaagtgcagaaactgaagaaatatgtccgctccctgcgtctggcatttacagtcaacaacctggcaaccatttccggttattcgggactttcacccatgattaacagttcaacagtgaactccactttaggcgtggatgataaacggggatatccgttggcgcggacgtacacactgggattgagtattaacttttaatggaggaggagatgatgaaacaatatatgaaaaataaaagtctttttttgcagaaagaagaactgctttcaaggatagcggaactgttttcaaagaagatcttacgtccttcgggagtgctggtattccttcttataacgtgcctgggtttattctcatgtagtaagtttttggaggaaaatccgaaagataagttacccgaagatgacgtttacaatacaatctcggaagtatatctcaatgcagtagcttcgctttatacatacgtaggcggttatagtgatagtcagggattgcagggaacgggtaggggagtctacgacctgaacacctttacctccgacgaagccattatccccacccgtggaggtgactggtatgacggtggtttttggcaaggactttacctgcacgattggggaatagagaatgatgccattcaggctacatgggaatatctctataaagtcgtcatgttaagtaacaaatcactggaacggatagacaaattcgccgaaactcattccgctacggaactgccggcataccgtgccgaagtacgtgccatgcgggctatgtattattattacctgatggatttgttcggacgcatcccgctagttcaatcctcttccgtagcaatgaaagatgtagtgcaaagtgaacgaaaaacggtctttgactttgttgtcaaggaattgcaagaggcggctcctttgttgagcgatgcacatagcaaccagtccggcccttactatggccgtatcactcgccccgtggtaactttcctactggccaaactggctttgaactccgaagtttatacagacaatgattggacggacggacaacgcccggatggaaaaaatataaagttcacagtgaacggcagcgaactaaatgcctgggaaacagttatctactattgtgaccaactcaagactatgggctacaaactggaaccggaatacgaaacgaatttctctatattcaacgaaccgtccgtagagaatgtcttcactatcccgatgaacaaaactctgtacaccaaccagatgcaatatctcttccgttcccgccactataatcacgccaaggcttacggactaagcggtgagaacggtcccagcgccaccattgaagccctcgaagctttcggttatgaaaccgcggaacaagatccccgttttgatatttgctattttgcaggaattgtccacgacctgaaaggaaacataatcaaactggataatggaacggtactggaatatctgccctggaaagtatctctggatataacagataccccatacgaacaaaccgcaggagcccgcatgaaaaagtatgaagtcgacccgactgccacaaaagacggtaagttgatggagaatgacattgtattgttccgctatgcagacgctttgttgatgaagagtgaagcgaaagtccggaacggagcaaacggagatgaagaactcaatgaagttcgtagccgtgtcaacgcttctccccgcactgccactttagagaatatccttgccgaacgtcagctggaactggcttgggaaggatggagacgacaggacttagtccgcttcgggaagtttacaagagcttacagcagccgtccgcaactaccggatgaggcaagtggatatacaactgtattccctataccggagaaaatacgggtgatgaatgagaggttgaaacagaatccggggtattaggaagaagatagtagtaatcaaaataaaaaatcctcgattttcatccggagaatcgaggatttatattatttgttgcagcaatcgaattactcaatcaaaacgaaatcatatttttcaaattcactcccattgattattatagcaatttgatgaagcccgagatggaattttctcgtcgtaaccacgcggaaagagtgctttcgcgttattcgtgtggtagaattcccggtatattctttttcgctgattttatgaactttcttcgtcagcgttccatttgctttttggtaataaataccatattcaagccgtattttgattgtcttattgctatgattcaacaagttaaaaccaaactccaacgaatcaccgactttaaccttaagacttgaaatctgaaaatcctccatactaatattatttctgatagaatcaaagccaaacaactccatcacctctggaatcccttgttttaagagcgtccggcaaccgtgtttaataatccagtctacctctttagattcccccttccatttctttgccaaatcaatgacaatttccggattatctttcgcaatatcattcaaattattggcaacgctcaaccgtacaaatcttgccggatcatttttaagattctctaaaataggaataataggtgtcgggtctttcttcagattcggcaaagccatcgcccaaggcaaacgcggacggcaaccttctgacgaaagccgcctgactccccaatgctcatgtttcgaccaaaccaacatctgcttcatcatttcatccggatattttattataaaaggatgagtcacaaattcgcaacttgtgaactgtgtgattttctctatcgccttgacagacgtttcataatcatccaacccatattgctcgacataattattcagaatcaccccatactccagcatcaatccaaacttcgtatcgtctatcaccgaaaaatcaggccgcgtactttttacatgatccaacaactcaagaatcttagcgatcgcctctttgtaatctgccggcaaaaactttttcagaatgctagtgatatgtatccagcgctgttttagttccctgccttcccattcatcatccattatttgagaaacaaaaccgtgagcatcaaaatcatcgataacaagtctcaaatctttcgtaaacagatcgaaaaattgcttgttgtacatattcttaaaaggttctgccatacttgaagtctatatttagtatctatttatttgctacacaaatatatgtcttttttttaaaaggacaagccctaaaaacagaagtgagccacaaaaaagattgcagctcacttataccttatatattatagcaaaaaattaatcgaagaaactcttgaacttcttgaaaatcttctccttcaccgacgtgttaggtttgaagttgtccgaagcctccatcttttcgagtgtgctcttttcctctttattgagcgcttccggcacatagatactgatgttgacgagtaaatcccccgttccgtacccgttcacattcggcaatcccttgccgcgcaaacgaagcaccttacctggttgagtacccgaatcaatcttcactttcactttgccgtcgatagtcggaatttccacagctccgcccagagcagcagtcgggaaactaagcaacagattataaatcaaatcattctcgtcgcgaatcaagtcctgatgcggttcttcctctacgagaatcagcaagtcgcctgccacaccattgtgtttgccggcatttcctttgccacccatagaaagctgcataccctctgccactccggcagggattttcaccgacaccacttcttcaccgtaaatgattccgtcgccaccacacttcttacatttgttcttgataatcttaccctcaccgccacaagtagaacaagtgacgcgagtctgcatagtgcccagaatagtctgctggttacggatcacggagccgctacccttacaagtaggacaagtctccgaaccgccgtcaccttcggcacccgtgccatgacactggtcacacggcacatattttttgagtttaaatttcttttctactccggtagagatctccttcaacgtcagcttcactttcacacgaaggtcactgccgcgataccggcgttgctgtgaaccgccaccgccaaatccgctaaaccctccgaagcctcccccgaaaccgccgccgcggccaccaaagatgtcgccaaacatagagaaaatgtcatccatcgacatcccctcgccaccgaaaccaccgaacggaccgccattgcctgccgcaccgctcactcccgcatgaccgaactgatcgtaacgcgaacgcttttccgggttactcaacacgtcataagcctcggccgcctccttaaatttctcttccgcctccttatcccccggattcttgtcagggtgatactggattgctttcttacggtacgctttcttaatctcctctactgtggctgtcttcgtcacctccaatatttcgtaatagtctcttttttctgccatgcttctttaaaaattatgagttttatgggttgcgaatccttattcccctactaccactttggcgtggcgcaacactttgtcgttcagtgtataccccgtctgcacacaatccagaatcttacctttctgtgcttccgacggtgcggggattaccgctatggcttcatggaaatcagtatccagcggttggtctttcgtctcgatgactttcacaccattttgagccagaacagccataaatttattgtaaatcagttccaccccttcttttacggcattgacatccgttgccgtttccatcgtcttgatggcacgttcgaaatcgtccactaccggaagaatactgccaagactcttttcgccaccattcaggatcagttcggccttctcctttaaagtgcgtttacgataattgtcgaactcggcagacaagcgcagatatttatccttttgctcttcaagcgcttcttgagccttttccagttccttttccaactcctcttcatgagtcagcggagcggttccctctgcttgttcgttttgcggttggtcttccgcaggattgtgagtttcctccacattcagttcctcttccttcacttttttttctttcggatccatcttggtatttactattttattatttactatttagaaacacacgttatctatgcaagataccgcttataaacataccggactgaccggatgtcacagatttcgtctgcaaaaactttgccaagttggccgttttgccaaaaaacgcagcaaaggtaacacttttatgtcagattggcacatatcagatagctcataattcattttaaatgtctacctttgcacgctcaaatagtaaatagtaactagtaaaatagtaaataataagatgattacagtttcgaacgtatcggttcagtttggtaaaagagtgttatttaatgacgtaaacctgaagtttacgagtggtaattgttatggtattatcggtgcgaacggtgcgggaaaatctacgtttcttcgtacgatttacggagatttggacccgacaacaggtacgattgcgctcggaccgggcgaacgtctctcggtgttgagtcaggaccacttcaagtgggactcatatactgtcatggataccgtcatgatgggacataccgtgttgtgggacatcatgaagcagcgcgaagaattgtatgcaaaagaagatttcacagacgaagacggactgaaagtatccgaattggaagaaaaatttgccgagttggacggatggaatgcggaaagcgacgcagccatgctgttgagcggactgggcgtgaaagaagataagcattacgtattgatgggtgaattgagtggtaaggaaaaagtgcgtgtcatgctggcgcaggcattgtacggaaatccggacaacctcttgctcgatgagcctaccaatgacttggatatggaaacagtgacctggttggaagaatatcttgccaacttcgagcataccgtattggtggtaagccacgaccgtcacttcctcgactctgtatgtacacacaccgtagacatcgactacggaaaaatcaatatgtttgccggtaactatagtttctggtacgaatccagccaattggctctccgtcagcaacagaaccagaaggcgaaggctgaagagaagaagaaagaactcgaagagtttatccgccgtttcagcgcgaacgtagcgaagagcaagcagacaacgagccgtaagaagatgttggagaaactgaacgtagaagaaatcaaaccttcttcacgtaagtatccgggcatcatcttcactcccgaacgcgagccgggcaaccagattctggaagtttccggattgagcaagaagacggaagaaggcgtggtgctcttcaacgacgtgaacttcaacgtagagaaaggtgacaaggtggtattcctgtcacgcaatccgcgcgcgatgactgctttcttcgaaattatcaacggaaacatgaaacccgatgcaggtactttcaactggggggtaaccatcaccactgcttacctgccgctggataacactgatttcttcaattccgacctgaacctggtagactggttgagccagtttggagaaggcaacgaggtatatatgaaaggcttcctcggccgtatgcttttctccggcgaagaggtattgaagaaagtaagcgtactctctggaggtgagaagatgcgttgtatgattgcccgtatgcagctgcgcaatgccaactgcctcattctggacactccgaccaaccatctggacttggaatctatccaggcattcaacaacaacctgaagacgtacaaaggaaatatcctcttctcgtctcatgaccacgaatttattcagaccgttgccaaccgcatcatcgaactgacaccgaacggtatcatcgacaagatgatggaatatgacgaatatatcacttccgaccatattaaggaattgcgggcgaagatgtacggagacaaataagtgaccggacgaataaaagcccctgactcccatacatgaagtctgatgaataaccaatttaacagcaacctattctcaacaatgggttgctgttctttttagcactatggaaataaaatattttgaaaacagagaagattggcgaaaatggctggcagacaactttgaaaacgccaatgacgtttggtttgtattcccctccaaatcttcgggcgaaaaaagtgttacatacaacgacgctgtcgaggaagccctttgcttcggatggatcgacagcaccataaaggcgctcgacaaagaacataaaatccagcatttcacacccagaaaccctaaaagttcctactcgcaagccaacaaagagagactgaaatggttgctggaacataatatgattcaccctgatagggaagataatatacgaaaagtattgtcagccccttttgtcttcccgaatgatatcatcggaaaactgaaagaggataaaacagtatgggagaattaccaacaattttccgatgcgtatagacgtatccgaattgcatacattgaagctgccagaaaacgaccggaagaatttgaaaagcgattgaacaacttcatcaataaaacgaaggaaaataaaatgataaaaggatttgggggaattgaaaaatactactaatccctatgtctgtaattgtaactttgattgtaataacaggacagaagtattatgcgcataattgatattcaattctctttctcgaacgtagttatttttctgcccttcacctttcttccagattcctgataaatagtgtgtttacgggtgaaggggcgctcttacaccgtctttttaccgtaagcgtctccgcgattctatcttgtcggccttttttcattcttatatttttgctatgtataaaaatgaagcattatggatttagcagaaaatcgatttggaaaaacttggaaacatttccttgaagtattgaaagtagactacaattgttctttagccgatgtttgccgcgatcagcataccacttttggtggtatgagttcctggatgtccagacggggctatagcgttaaacaagccaaggcagatgtggtccgtgattattatggcggcgttgaaccctcccaaccgacaacttcctctccttcattcactcaaatagcacccgccatgttgtcggaagaagagtttagtcttgccgggatcacaatcacctttaacagtggaaccaccatttcagtcaaacgggccacacccggtggtgtgattaaaatgttgcgcgattacgaaagaaaggagggagatccatgtattctctaacatcagccaatcgatactatctgtaccagggctttgttcgtatgaaccttggcattgacggtttattcaaaattatacgatcggaaatgaaggacttgtctcccgtttccggagatatctttttattctttggtaaaaaccgacaaagtgtaaaaatactgcgttgggatggcgatggctttcttctgtactacaagcgcctcgaaggtggaagttttgagttaccgacatttaaccccaatacaggcaattacgagatttcttatcaggttttgtcttttatcttaaatggagtgtcattaaagtctgtacggttgagaaaacgttttaggatctaattcaacattctgattattagacatttgcaataaagatatcatccggtttatttggctaattcgttgattttttatatctttatgccatgaaaaaggatgagatcatagagttattgaaggaacaaatcaagggattacgagatgacaacaacagactcttggaccaaatagatgctttgataaaggaggtttcttcccttaaagaggcactccttcaaaaaggcgaatctcttagcaagcaacagcgccttactaagggactcgccaaacttgtatccaacacatccgaacggcaacaggctccccaatctgccatatccgaagaagagcggcagaagatagaagcggaaaaagcagataagcgtaaagcaagaaagaacaatggggccaaacgtgacatgcattatgagatggaggaagaagaacatgtcgtttatcccgatgatcccgattttgacatcaataaggcccggttgtttaccactgttcccagaatatgcgtccgctatgaatgtgtacccatgcgcttcatcaagcatgtctacaagatacacacctatacgcaagaaggtcgcctgtttgagggaaaaacaccggcttcggccttcttgaattccagctatgacggttcatttattgccggattgatggaattacgttatatacaatcgctacctgttgaaagaatcatcaactacttcgagagtcatggctttacgctgaagaaacctacggctcataagttgatagagaaagcctcaaacctcttcgaaaatctttataagtgcatccggcagacagctttgagtgatccttataaggcagccgatgaaacctattacaaaatactcgtcccggaaaagaacagcaagggaaaaggagtcaggaagggatacctttgggtggttgtcggcataaacaccaggatgatatacttgctctatgatgacggctcccggtctgaaagagttattcttaacgaattaggcagttgcaaaggtatcatacaaagcgatggttactcaccttaccggaagctcgaaagcgatgcttatcccaatatcacacgcatcccgtgcttgcaacatataaaacggaaatttatagattgcggtgagaaggacccggatgcaaaaaggatcgtggagctgataaacgcactttatcaaaacgagcataagcataaagttggggttgagggatggacggtagaacagaatcttatgcatcgaaaaaaatatgcgccggacatactcggagaaataaaagatgtgtttgatgaaatagaagaacggggggatttattacctaagagcgaactgcaggaagccattacctatcttcgcaatgagtggaatgcagtggtggacatctttaattatggtgacacttatctggacaacaatatggttgaacggatgaaccggtacatatccttatcaagaaaaaactcattgttcttcggcagccataagggggccgaacgaggcgccatactctatacgatagcactcacttgtaggatgcataaagtgaatctatttgagtatctcacggatgtgataaacagaacagccgaatggcaaccgaacacaccaattgaaaaatacagggaactgcttcctgacagatgggaaaaggctaatgactaaaaagggatcattagcctttttattttaatacactatatagaatcgcggagacgcttacatatgcaatacgatgaatgtaatgatgaaaaactctaccttcacccgtagagagcttatttatcaggagttcagaagaaaggtgaaggagaatagagaaatgagttttttgtaggagaagtgtgaaacttcttttagtataagtaaaaagtatagctttagagaacggaaagcttagctttaggtgggcaaaagctatgctttaggaagaggaaacaatctatatgtgaaataatcatgaatatattcattctgcttaaaattggccaaaagcatgtttcttttaaataagaaaagggctgtttttagtaagttgaagttttagacagccctcaattcttttatttcttataaaccaacttactcggaactccctccccgaacaagttatctcccagcgttgtaatcttatctcccgtagccaatacatagcgaagattatcgcatcccataaaagcaccgaattcgatagccgttacactggccggtaattccagcgtgccgcacagacgaccgcaattactaaatacacgctgtccgattgacttcaggttatgaggtaatttcatattcagcagatacttcttctgcgagaaagtgaagtcggggatagccgttgcatttgtcttggaaatatcaaccgatacgagattcggcatataatcgcggataagtttgaagtctgcgttatccagtttcccttcaacggtcaggaagttgatgtctctgggttgcagtccggctttcaggatctcttcttccagtttacccattgcacccacttgcagggtagtctctaccggttcaccttcgatgaaagcaaaattctgccatctgtctttgtagcggtaagcgtcgctgctgcccagagggacgaagatggcggtaacgctgtctgccaatgcttccggcagcaggttgggagctgtctttttccggatctgacagattttcagattctcacagcctttgaaagcagcatcttcgatattcttcgttttctcggagaggatcactttttccagtgtggctttacctttggtcactccgcctaccacattcgagaaagcataggcagggatgaagttcggcatataaatgtagaattttccattgggataagtaccggcttttccgctgtacatcttgatttctgcgttcgaaatatccaatactttcagattggcaaattcgtcacggagatgccggaagtcctctgcgttcagttttccggtcagtgtgaggtgggtgacactgttggcttcctcttcagtcatcatggaaatcagcgtaccgggcttactcacataatacgtcttactcacttgggcggcggctcctaatgcattagcggccagtaagaaacttatcaatagtagtttaattttcataattttgtagatttgttctgacaaatataggaaaaatagagaatacatgatgtttttttatgttttatatctaattttgtagccggattaacaaattgtaaaaatggaggcagacaacatagatgggaagaaagaacccaaaagacttcctgtgtgggcatgtatcccgctgtttattgtggtacttttcatatttattggattgtatgggacactggttagcggaggcttgtcgttggttcttggagtggaggctcgtcatccgggagtagtagggtatattttcgtggaggccagtatgcttttggctgttcttactgctgccgtaatcttgcttcgtctcgaacgtcgtccgttttctgatttgggactttctttaaaaggacatgccagtggactgtggtatggacttctgatggcaatcttgctctatttgctgggtttcggaatctctgttgttttgggagaaatagaagtcaccggttttcagtttaagccgttggatttattggggtcgtgggtgtttttcctgttagtggcgttgtttgaagaaattctgatgcgcggctatatcctcggacgtctgcttcatactaatatgaataaattcctggcgctcttcatctcgtcggcattattcgcgtttatgcatatctttaatccagaaatagctttcctaccgatgcttaatctcttacttgccggtatgttgctgggtgcttcctatctttatacccggaatctgtgtttccctatctctcttcatcttttctggaattggattcaaggtccgattctaggttatcaggtgagcggaaataatttcacgacgagcatgctgactttgcgtatgcccgaagaaaacgtactgaatggcggagccttcggttttgaaggctcgctcatttgcacagtacttatgattgtttttacgattctgatcgtgtggtggggagaaaaaagggaagcaatcagtcttgctgtaccccgatcatactaagctgaatccgtttccggtcataatctacattcatcactctgaccatgacgtgttgatggatggataccacttccgtcggatcggaaatgaaccgttccgctaattgcgagaggtgcaccagtccgttctccttaatacctatatcgacaaacgccccgaaattggtgatgttgcctacgatgcccggaagaatcattccttcgcgcaaatcggctatggtgcgcacgttcttgtcgaattcgaagactttgatagccttacgcgggtcacgtcccggcttgtcgagttcctgcagaatgtcctgtaaggtgggcagaccgacggtaggggtgatgtaggcggagatgttaatcttccggcggagttccttgtcggctatcagttcgtcgatggtacatttcaggtctttggccatttgctctacgatgtggtagctttccggatgcacggcggtgttgtccagcggattcttggctccggggatgcggaggaatccggcacactgttcgaaagccttggcacccatgcgaggaactttcatcaactctttccgtgaaccgaaagctccgttttccgcccggtagttgacgatgttttgagccagttgcggtcccagtccggagatataagtcaatagatggctgcttgccgtattcaggtttacaccgaccaggttcacgcaattctctactgtctgatcgagcgcttttttcagttttgtctggtctacatcgtgctggtattgacctacaccgatggatttaggatctatcttcaccaattctgccaacgggtccatcaggcggcggccgatggagactgctccccgcaccgttacgtcataatcgggaaactcgtcgcgggcaatcttcgaagccgaataaatggaagctccctgctcactgactacaaacacgggtatctgacggtcgaagctttggctgttgatgaaatcttctgtctcacggcttgccgttccgttgccgatggagatggcctctatctgataggcctcaatcatcttgcggagtttggaagcagcttctcctgttttgttcaccggaggatgcggataggtattctcattatgcaacagattgccttgtgcatcgaggcagacaactttacatcccgtacggaatccggggtcgatggcgagcacccgtttttgtcccaatggaggggcgagaagaagttggcggaggttctcggtgaatacccggatggcttcctcgtcggctttctctttggattgagcggcaaattctgtttcgatggagggcttgagcagacgcttgtaggcatcgactgtggcttcgtccacctgctggctacactcgttgttgccacgtacgaactgacgttccaggcgttcgatacatgcctcgtcgtcgggattgatggatacttttagcaggccttccgactctgcccggcggatggccaacaggcggtgggacgtgcaacgtttcagtgcttcggagaaatcgaaataatcccggtattttgccgcttcttcctcttttcctttcactactttggcactaatctctgcctggcggctgaactgattacgtaccgcgttgcgggcacgttcgtcctcgttcacttgctctgcaatgatgtcacgggcgcctttaagggcatcttccacatctttcacgtctcctttcacgaaggaggcagccttggtactaagattgttttccctttgcaacatcaggatggtggcaagcggttccaaccctttctggcgggctacttcagcacgtgtcttccgcttgggtttataaggaagataaatgtcttccagttccgtcgggttccaggtgtcgttgatgcgtttctccagttccgcagtcagtttgccctgttcggtgatggtgccgagaatcgtttctttccgtttggctatgtcgcacaacttatcgtgttgctcttttatttgctctatctgcacttcatccagtccgccggtggcttctttacggtaacgactgatgaagggaatcgtagcaccttcacccaaaagatggagcgtactacttatttgtctttccggtatacccagaaaaccggaaatcatcttgtgaaataattccataatttgtattttttgagagtaaatgagcgacaaaaatacatataaatctgctaaacccgacaagttttactatatttgcaactcaattaatgaattaacacatcaaaactgcataattatgctgggacgtcttggatatctttttatctgtttcctttggcttctgcagtcaacggaagtattggctgtctctaaagataagaaacctattctgattatttgctcttataatccggcagcacaccaaacctcggtcactatttccgattatatggatgaatatagtaagttgggaggacagcgcgacattgtcatcgaaaacatgaactgtaaaagtttctcggaggctccgttatggagcgcgatgatgacgcagattctggctaaatatcagggagaaaagcatccggcacaaattattttattaggacaggaagcgtgggctgcctatttgtcgcagagggatgaaatgcaggtgaaagtgccggtgatgtgcagtctggccagtagtaatgtggtgatattgccaaaagatacggtggaaaatcttgattgctggatgcccgaatctgtcgatatctttgaagatcatctggatattcccgaactggaatcgggatttatcaatcaatataatatagaaggtaatatctccatgattcaagctttctatccgaaaacgaaacacattgcctttatctcggacaatacttatggcggagtgactatgcaagcgttggtacgaaaagaaatgaagaagttccccgatctggatttgattttgatggacggccggagacattctatttataccatcgttgaggaattgagacagctgcccgaaaatacggttattctggtgggaacgtggcgtgtggatatgaacgaggggtatttcatgcggaatgcgacgtatgccatgatggaggctactcctaccatcccggcttttactccttcatcggtgagccttggatattgggcgataggaggagtgctgcccgattatcggaaagtgggaggagaaatggctatggagtccatacggatggatcagcacccggaggatacggggaagcatctttcgatcattggctctaaagcggtattggatagccggaaggtgaaagagtgggggctgcacccaagcgtgttgccttttaaagtgcagcttgtcaaccaaccggtttcgttctatcagcaatatacttatcagatatggtctgcttgtgctttgttcgtgattctggtacttggcttatgtatctctcttttctattatttccgtacgaaacgtttgaaagacgagcttctgaaatcggagaaggatttgcgtgtagcgaaagacagggcggaagagtctaatcgtctgaagagtgctttccttgccaatatgagtcatgagatacggacgccgttgaactcgattgtcggcttttcggatgtactggcaatgggcggtagcacggaggatgaacagcagtcttattataagattatcaaaaccaattcggatttgttgcttcgtctgattaatgatattctcgatctttcacgtctggaggcgaaccgggtgactttgacgtgggaggaatgtgatgtggtgcagttgtgtagtcaggtggttgcctctgttagtttttcacggcagtcgtcggacaatcagttcttgttttccacttcttttgaaactttccggatggtgacggatgtgcagcgtatgcaacaggtaatcattaatctgctgtccaacgccgacaaatttacgaaacgcgggaagattaccttggacttttctgtgaatgaggaaaagcaaatggctattttctcggtaacggataccggatgcggtatcccgaaagaaaaacagggacttgtgttcgagcgttttgaaaagctgaatgagtacgcccagggaaccggattgggattgtctatctgtaaattgattgtgcataaatggagaggaagtatatggatcgatcctgactataccggtggggcacggttcgtattttcgcatccgctaaatatagaaaaagaatgaaacgaataggatttatttatggcttgcttttctgtctcgtactgtctgttgcggcgcaggaaaaggtggtgaagctgaagattgtggaaacgagtgacgtacatggtaattattatccttacaattttataacccgccacgagtggaagggtagtctggcacgtatttattctttcgtgcagaaagagcgtgaacagtataaagagaatctgatattgctggataatggtgatattttgcagggacagcctactgcctattactataattatatagatacggtgtctcctcatctttgttcggaaatgatgaatttcatgaaatatgatgccggtaatatggggaaccatgatgtggaaacgggacgtgctgtgttcgaccgttggatagccacttgtgacttccctgtgttgggtgccaacatcattgatacgtctacgggaaaaccccatctggctccttataaggtgttggaacgtgatggcgtgaagattgtggtattgggtatgattactcctgccatccctgcatggctttctgaaaatctgtggaaaggcttgcgtttcgacgatatggaagagacggcacgcaaatggatgaggattatccgtgaaaaagagaatccggatttggtgatcgggttgtttcatgccggacaggaggctttcaaaatgtcgggcaaatacaatgagaatgcttctcttaacgtagcgaagaatgtgccgggattcgatatcgtgttaatggggcacgatcatgcccgcgaatgtaagaaggtgatgaatgtagccggagattcggtgttgattatcgatccggccagcaatggaattgtattgtctaatgtcgatgtgaccttgaaactgaaagatggaaaggtgcagagcaaggacgtcaaaggggagttgacagaaacggaagcttacggaatcagcgaggatttcatgaagcgttttgctccgcaatatgagacggtgcagaagtttgtatccaagaagatcggcacttttaccgagagtatctctactcatcctgctttcttcggtccttctgcttttattgatttgatacatactttacagctcgatataaccggagctgacatctcttttgccgctccgctttcgtttgatgcggagataaagaaaggggatgtgtttgtcagtgatatgttcaacttgtataagtatgagaatatgctgtatgtgatgacgttgtccggaaaggagattaaggattttctggagatgtcttattatatgtggacgaaccagatgaagtcaccggaaaatcatctgctctggttcaagaagaaacctcgggaaggtgcggaagacagggcttctttccagaacttcagttttaatttcgactcggcttccggcattatttatacggtggacgtgacaaaaccgaagggagaaaagattacgattacgagcatggcggacggttctcctttccgtatggataagatatataaagtggccttaaattcttatcgtggtaatggtggtggagaactgttgacgaaaggatcgggtattccgcaggaggatttgaaggaccgcataattttctctacagataaagatcttcgtttctatttgatgaattatatcgaaaagaaaggtacgatgaaccccaaagccctgaatcagtggaagtttgttccggagaaatggacagtgccggctgcccaacgtgattctgtatatttattccggtctgttcaataagtaactaaaagtgttcattatgtctgataatactcttgaacggcttgtatatctgattaaatgctggtatatttgtcgcaaaaaagagagagtatgtatattcaaaatgttcccaaagtaggtatttcttcggtagttcattctaaacatatagattctggcaacattgatgttgttgataatgatatagcgctcttcgatacggagagcgttatatcgttgtataatggaccgactaaactggaggtgttgacggtaggtctttgcctggaaggtactggtacttttaatattagtttacgtgagttccaactgttccccggattaatggtgatcgcgctgcctaatcagattgtcgaacagcggtgtttcagttccgactttaaagcgatattctttgctgtgtcgaagaacttgttggagacattgcctaagatcagtaatgtgctttccttattcttttatctgaaagattacccgtgtttcaatcttacaccgcaggagcaggagactgtgaaggaatatcatgcatttatcagaaaacggttgaagaataaggaggctttatatcgtaaagaagtggtaatgggcttgatgcaagggttcttttttgaactttgtaatatctttaccaatcatgtgccagccaatgctactaccatgaaaaataaaagccggaaagaatatattttcgaacgtttttatgagtctttagtggagtcttaccagtctgaacggagcgtgaaattctatgctgaccagttgtgtctgacgccgaagcatctttcgggagtagtaaaagaggtcagcggaaaaacggtgggggagtggatagacgaactggtgattctggaagcgaaagcacttctgaattcttcaagtatgaatatacaagagattgccgatcggctgaattttgccaaccagtcgttctttggaaagtatttcaagcattacactggtatgtctcctaaagaataccggaaaagccgctaaaatcatagaacaccggagcgcacacggcttagtgtttccggtgtcatcaaaagataagaggcaatgtgtgccagaggtgcacgtttgataatttccggatgtgtttcgagcaggaggttatagcgttcgcgggcggattcaaagcgccaggagtctgctttaatctgtgacacaatcaaggagtattccagtatcttttggtagaacatattgatttcccagttctcttttgccaatttttgtatcatgtcgcgagggaacaggtagataatggaaggttcgagggtttccacgattagccgggtgggtacttgtttcagaaaactctcaatgcacatcacgatacatccttcgtatgagaaatgttcggtcacgtctttcccattcttgtaatagtactgcctaagcatccctttgccgacaaatacgatttcatgagctacttctccttcattcagcgctattgctcctttgggaaattcttcacgaatcagtatactttctatctgtcgtcttccttctatactcatttccggaaagcgggaatttacaacagcatttacagtctctcttaataatgtatccatgtcttttctgtcttgatgtgtgcaaaaatactaaaaacggttgacataaatcaagtgtggtataaaaaagatgtatctttgtccgcaaaatcaagaggtaagatgataatgaataagataataggcttggcagtgttgctgttctgtttgagtggttgcgtaagggataatgatgctatttattatccggttggcaacgtagatgtggaaagaggcggtccggctttggaggctggaaagggtgatttaataacccgtagttacaataccgaagattatgtgctggacacgcttgcgcaatatccgggtgatccgacgcttggtaaactgacattcatggtcagtctgaaaaaccggttggcagatcaggaggtgagtggctttaatggtgtcggtctatccagactaacgatgagtcttggatataaagacggcaactatccggcagaaagccaggttcctgtttatacttcgtccgacgtgactgccagttatgccattaaacttcgtttaaagggagaattgactttaacaggagacgaatggatgattgactatatttatgctcaattagcgggtttattccagccttatcctcctacgtctttcccggaagtgtttatgtgtaaagggggtgagcaatcgtatgcaacgttcgattcttttcgtagaacctggacatttgatattacttatgatcgttccaacctttctttcagccaactgtatttcaatctgtttgtgaatctggcaggacagaaaagggaggatagagtccggttgaggattgataaggaatcttatttcgagatctataaagaaaaagaggaaatgtagttaaactgcatttcctcttttttctttggtagtgggtacgagaatcgaactcgtattacatgcgtgagaggcatgtgtcctaaccgttagacgaacccaccggagtttgatagatttaaaaagagccaagtctataaaacttagctctttttattttgagattttgcggaagctgggggattcgaacccccggtacccttacgagtacgtcagtttagcaaactggtggtttcagccactcacccaaacttccttgaacccgcattctctctcaaatgcggtgcaaatatagggggaacttttggactacgcaaatcttttagcaagattttttttacctgttttttgtgaaatgagataacctgctatgtttcaaatgttaaacggaagaaatttttttcgaaagcttttaatttttatcgatggaatgggaacttgaaacatattgacgctatccgcttattatagtgacggtatcttcatgggatagggtaaacatccggatgggatagtgacggtatatttgacgtgagaaaagaacataaaaaaaggctatctatcccagacagccaatcttttgttaaccttaaatctaatactatgaaaaacacagtacaaatatacggacttctgtcgaatttgcaaataaaacaagaaaaaagagatgttttataacattgattaaatatttgattcttcaattctatttttattaagactttcagcgttttgaacactatattcccaatatttatcacataatttcagataactggtctcggcacttttgcctcctaaagaaatggcatacatttttgtctgttttgcttttgcatgttctatggtccgggatagcagtttatcgactggacgcatctcaaaatccgatacggtgatgatgtctgcttccatatatccttcttcgctgatctttcgcaaagcatgtgtgatgactggttccatatctgtgccaccatgaaaagattggcttagaaaatcgacaaggcgatcgaaactactccctaaatcggttatttcaatacactcgatatcatcggagaagaggatgacgtaacatttccgatgttgtacttctgtcaattcggcaatggcaagtagagtagattttgcgattctttcccgttcgcctgccatagaaccggaagtgtccaggcaaacgatgaaagggccttcagcttcttcggaaacttcatttcctactgttttcttatcattgctggtttgtttctcgtgcgattgataatcgatgacttgtagtctcttctctatgaaacgctcgaaaaatatgggttgcaggttcttttccgccagataacaatattccagagggagaagactattcaaatcgtttccttcacaaatgcctgcaatatcacttcgggtggcatgagatataatttgttcccggtgaatacctgcggtcattttgaaacgtttccggctactttggtgttttttgcctaagatttctaccagttcgcggataacgggatttcgtttgatcgtttcttcgtattctaaaatctgttccgctatctgtttatgattgcgaagtagccagacgaggcgtgagccaccgcgtaccggaagatttttggctaatgccagttgaatacggtagaaatcctcacagagttgctcgatatgttccatctgatagttgaactcattgttcgagagtagcgtatgccacttgtcgaaaaaaagagtccgcaacgctttccattctttggaacgcgggctgattgcattaaaacgttggaggtagtattttacgttgaggtctaccaggtgatatttcatggagaaggggtatgcgctgtttttcaggaattgaagaaactttgcgtccgatgcttcattcatttcatgaaagtattcccattgcgatgcataacgggagtagaaatcttgcagggagggttgtgtgtgacgaaaatacaggtgaatgtccgcatccagttcttcgggacggataatcagattgtgtagttgttcgtcatacacatcataggctattccctgcaatttttcgtaataaatgtcttgcaggtgtttgagcctaatactctctgttctcttgttcatgggcatgagcgatgatacgaagttcgttccggtaattctctatgatatgtgcagtctcccctaagattcgcttaatcttgcttttttgcgatgagcttaagaaaagatgttcctttgtatatgctgtttcccgctcggagattgttttatattctacctccatttggtgaagtaaatctatcacttcctgcaatgtaaattcgaacggagtgctgtcgccctgctgtgctggcaaaggttcgcaattatcataacatagtagtggatactcctgattgttgacgaaaacggatcgtttcccttttcggagggaataaatattcttttgtgcgatatttctgttctttacaaaatcataagctttcaggattttgttgaccggacggaatttatcctgctgaatataaaacaatcggttactgtctttcctcaaagactggtagtcagaagcaaagatgagtaaatttccggcaatgtggtaaccttctatgcgatgatagaaggtatctactacctggattcccggatcgctaagttcccgtaggctgtgttcggacttcatgttttctttcagcgtatccagtttctgttccagtcgtttttctcccaataaatatgtattgattccccgtgcaatcgactgttccactatgttttcgatgatggggagctgcgaaacttcatcccacagacaggcactcatcagcaagcagtcggagaagtgaattcccggagattcgttcagataggccgaggtgcggagcagacctactatttttttccaacggcggtcggatatatagatcggaggggtgttttcatcccgccctgtattatattgttcgatttctcgtttgatattgtgaatcagctcgaagatggtatagtggatacctactttctcactttcagcttgtatttgattgtataattcatcgtctacctggagttttgccgggatttcaggttctacttcccgtgtagaagaaatcatctggtcgaaagcatattcctgttcaatgcatccgacaaactggcggatcaggaaacggtcgtatagggcttccagtccttcaccttttgcgggtagttcgttggacgcggcaatcagcgctttcagaggaacacgcaccgtaaattgtccgttgcgatatatcttttcattgattactgtcaaaagagaattttggatagcaggaccggctttccatatttcatccaggaagacaatcgatgctgtcggcaagtatccttttgtaatacgttcgtatgtatcttcatctttcaattttgagatggagacggggccgaatatttcatccggtgtactgaaacgagacatcagatattcaaaagcatccgcatctttaaaagccagtttgagcctgcgcgccactaagctcttggctactcccggagggcccaatagaaagatactttcacctgccatggcagataatagggagagtgcgatggtatgttctttttcgaatactccctcattgagggatttcagcagttgggtgatatgggatttgattgacttcatgcgacagatgatttcatgtgttgttaacaggaggcaaagatacaagaattctttgaaatagacttcattggggggatttacccctagatttaggcaatttcctcccgataagtaggagttttcagtttcataaggaaaattcattctctacttttgttctatcgaaagataaatgatagataataattagagaaccgttaaaaataaaggaatatgaaaacgaacacatttaaatacttcggtttggctttgatggctatattgatggtaagttttacctcttgcgaagtggaaatagacagtttctatgatgatgataataatggtgcaggatactataatcgttcggctgatttgtgtagccgtacctgggttagtttctaccgggacatggacggtaactattgccgtcaggaactggatttctttttagatcgtacgggaattgactatatacgggtggaatatcctaacgggacagtagagcagtatgaatataatttccgttggagctgggagaattatgcgcagacttccattcgtatgtcatacggaccgaatgatgtttcatacctggatgatgtgtacatcggtggaaacaggttaagcggttatctggacggacgaaataactttgtggagtttcaggggaaatgatgaaagataaaacggaaagaaacagagggaaaaagatcgtttgagggataacaagatgcaggtgaaaagagaaggataagatagttaagatagaaataggatagttattaggaacaaaataataggtaacggagtaaaagggtaatcaataagatttcaagatatatgattcagggtataaatagggtgcgaaatgaaagcttaaaagttttgaaccggactaaatagtttttatctttgcgccctattagtttttatatacatggagtggttatatagtctatttctcgaacattctgccttacaggctgttgtggtactttcattgatttctgccattggtctgggcttgggaagagtgcatttctggggagtttccctgggagtcacttttgttttttttgcaggcatcctcgccggccatctcgggctttcggtcgatccgcagatgttgaactacgcagaaagtttcggactggtcattttcgtttattctctcggtttgcaagtcggtcccggtttctttagctctttccgcaaaggaggggtaacattgaatatgctggcattgggagttgttctgttgggaacgttgttgaccgtggtggctagttatgcaacaggtgtctctcttcctgatatggtcggtatcctttgtggagcaacgacgaatactccagcgttgggagccgcacaacaaacattgaaacagatgggaatggacagcagtactcctgctttaggatgtgcggtagcctatccgatgggggtagttggtgtaatccttgccgttttattaattcgcaaagtgctggttcacaaagaagacttggagataaaagagaaagatgatgcgaacaaaacctacattgcagcgtttcaagtacacaatcctgctattttcaataaaagcatcaaggatatagctcgcatgagttacccgaagtttgtcatctcccgcttatggcgtgacggacatgtaagtattccgacttctgacaagatattgaaggaaggtgaccgtttactggtggtagctgcggagaaagatgctttggccttgaccgtgctttttggtgaacaggaaaatacggattggaataaagaggacattgactggaatgcgattgatagtgaattgatttcgcaacgtattgtcgttacccgccctgaactgaatggtaagaaactcggttcactccggttgagaaatcattatgggattaacatcagtcgcgtttaccggtcgggtgtacagttgcttgctactccgggattggtacttcaattaggagaccgcctgacggtagtgggagaggctgctgctattcagaatgtggagaaagtacttggaaatgctgtaaaaagtttgaaagaacccaatctggttgttgtgtttatcggcatcgtactcggtttggcattgggggcgattcctttctcttttccgggtgtcagtactcctgtgaagctgggattagcgggtggaccgattatcgttggtatccttctgggaacttttggaccacggatacacatgattacttataccacccgtagtgcgaatctgatgttacgtgccttgggactttccatgtaccttgcttgtctgggactggatgccggagctcattttttcgacaccgtattccgtccggaaggtttgttatggatcgctttaggagccggattgactattgttccaaccgtactggtggggtttgtggctttcaagatgatgaagattgatttcggtactgtatccggtatgttgtgcggaagtatggcaaatccgatggcactgaactatgtaaacgatacaattcccggcgacaacccatccgtagcctacgcgactgtttatccgctgtgtatgttcctgcgggtgattatcgctcaagtgctgttaatgttcttgttaaattgagaattgaaaattgagaaatgatggatttgtaaataaaaagtagtcatttcttaatcaggaatcgtataaaatagataaatttgtaacaagaaaaaggagaggaattaataaattccttttttgagttactaaatggtaagttgtcaactaataataagttgccaattaataaattgtaaatagtaaaatagtaaatagaatgactgctcaaagtaacataactcctgaaagcattgtgagtgatctccgttacctgcaactgctttcccgaagttttcctaccattgctgatgccagtacggaaataatcaacttagaggctatcttaaatctacctaaagggacggaacatttcctgactgatattcatggagaatatggagcttttcagcatgtactgaaaaatgcttccggtgcggtaaaacgtaaagtaaatgaaatattcggcaacactcttcgtgaagctgaaaagaaagaaatctgtactttgatttattatcccgaagagaaactgcaattggtgaaggcccgtgaaaaggatctggatgattggtatctgattacgctgaaccaactggtgaaagtctgtcagaacgtgtcttccaaatatactcgttcgaaggttcgtaaatcactgcctgccgaattctcttatatcattcaggagttattgcacgaatcgtctatcgaaccgaataagcatgcttatattaatgtaattatcagcacaattatcactacgaagcgtgccgacgatttcattatcgctatgtgtaatctgattcagcgcttgactattgattctcttcatatcgtaggtgatatttacgaccgtggtcccggtgcgcatatcattatggatacattgtgtaattaccacaatttcgatattcaatggggaaatcatgatattctctggatgggagcagcttccggtaatgatagttgtattgccaatgtgatacgtatgtccatgcgctatggtaatctgggtacacttgaagacggatacggaatcaatctgcttccattggctacttttgcaatggatacgtatgccgatgatccttgcacgattttcatgccgaaaatgaactttgccgatgctcattataatgagaagactttgcgtctgattactcaaatgcataaagccattaccattatccagtttaagctggaagctgaaatcatcgaccgccgtccggaattcggaatggctaatcgtaaacttctggagaagattgattttgaacgcggcgtctttgtatatgaaggaaaagaatatgctttgcgtgataccaatttcccgactgtagatccggcagatccttaccgactgactgaagaagaacgcgaattggtagaaaagattcattattcatttatgaatagtgagaaattgaagaagcacatgcgttgtctgtttacctatggcggcatgtatctggtttcaaactcgaatcttctttatcatgcttctgttcctctgaatgaggatggcagctttaaacatgtcaaaatacgtggtaaggaatactggggacataaattgctggataaagccgatcaattgatccgtaccgcttatttcgatgaagaaggagaggaggataaggaatttgctatggattatatctggtatatgtggtgtggcccggaagctcctttgtttgataaagataagatggcgacttttgagcgttattttgtagaagataaagagttgcataaagaaaagaaaggctattattacacattgcgtaaccgggaagatatttgtgaccagattttgacagagtttggagcttcagggcctcattcgcatattatcaacggtcatgtgcctgtgaaaacgattcagggggaacaacctatgaaagccaatggcaagcttttcgttattgatggcggtttttcaaaagcttatcagccggaaacgggaattgcggggtatacgcttgtttatcattctcatggtatgcaactcgtacagcacgaaccattccagtctcgtcagaaagccattgaagaggggcttgatatcaaatcgaccaacttcgttctcgaatttaattcgcaacgaatgatggtgaaagataccgataagggaaaagaactagtgactcaaatacaggatttgaagaaactgcttgttgcttatcgtactggtctgataaaagaaaaagtgtgatatgaatgctatttctttgcaatataaaattcaataacttttagtgcatcgagtgattcgttccacctaggtgggactaaacagcgacctgggtgggacgaaaggaaaaccttggtagaacgaaacaaacatccaggtggaacgaattataattagtaaagcaatgccttgatattagtgttttaatcttttcagcagtgtatcttgcccgactcctgtttagaaaagaacaatgcctgcttcgataatagctcccttatcgtaattactcgatttattatagaatctggttagcccataaccgcctgttgcaaagataccgaacttcctggtaaattgatattccagattggcacgtgcctgcaatgcatataaacgtttcggaatcacctcgtctttgttatcgaaagcctcgatatgctggtagccaaggtctccgctgatggataagcctttgtaaagagggaaggataaaccggcacgataggatgcacttgccgaaaacttatcattcaatccttgatacatggaaccgactcccagaatggtataaaacaattggttcttgaatcgtacacctatattggcaggcgtagcatttccaccatacaccatcatttgtactcttgtatcaggattcgcattaaccaatccgagttggaatcccttcatgtcttccttgtaataattgacaaggccaatttgaagtccgcgggcctgcgttgcataattacataatgctatttgcatcccattcagtttcgatgcggttatattggcaattcctgctatctgcaagccgttcatgtgttcgcctaccacattcaaaagtccggaagccatcaaaccgccgaagctctgccctgtaatatttgccgctccggaaaagtgtagccccgaagccatgttgcctgtcacattcatgaaaccactaatcattaaccccgagttgttgtctcctccgatgctcgttaacccggatatgactactccctgtgctctgtcgccggtgatatttaccaatccggcagcagaaagtcctacggtgttatcgccactgatattactgataccggccagctgaacgccccgcatagtaccccctgctaagttggctaatccggtgatttgtattccgttcatgtcgccatgaaccacacttcccaacgcattgatacccacaccgttcagacggttcattgtagacaggaggccgatgtttatgtatgtcgtctgtgtactgtcatgaggttgtgtacatatatctttccagatggatatattgatacctgcactcttgttctgtgccggtaaagaaacggcagccattagtatagctgccgtaagtattgttttctttatcttcattcctttctctttttcggtttaagtaatatcttatgcagctaactttatattagccttttgcttcctgatataagtaacgtttgatgctcttcttcggtgtcttttcgaattcttccggatagattttcatcttggatatctggctgtaagccggtagcatagtatttaaagtcacacggttttcttccattacttgctcgatgtcttcattcttcaggccatgagcgaaagcgtcgtcaaaatcaggataaacaagtccgacaagtttctcgttttgctgaacgataatactttcagccacgtatggcaggttgttcaacttatcttcaatttcttccggatagatattctgtccgctggcgctcaataacaggttcttgctgcgtcctttgatcgtaacattaccttcttcatccatcaaagccaagtcgccggtgtgtaaccaaccgtccttgtcaatgacttcttgagtggcttcttcgtttttgtaatagcccaacatcacattcgggcccttacatacgatttcaccaacgatattttcaggatcagatgacaatacccgtacatccatccgtggtacagcctttccgcaagaacccggtttgaactttctccaatcttcgtagcagataatcggaccacattccgtcattccatatccaaccgtataagggaaatcaatcattttcaagaactgttccacttcctgattgaaagcagcacctcctacaataacagctttgaagtttccgccaaatgctttaatcatttcttcgcgcactgttgccttaatcttatcattgataataggcactttcagtaatatcttcatcgccggagtttccaacttcggaagtacgcttttcttgattatcttttcgatgataagcggtacggcaacgattagactgggcttcacttcttcaaaagcctggaagataatcttagggcttggcatacgggtgaggaagtagatgtgacaacctacggagaactcataaaggaattcaaaagccaatccgtacatgtgtgccataggaagcatggaaacgattttatctccggcttccagttccaacacttcaaaagcaaatttggtatttgaccacaggctgcggtaggggagcattactcctttggaataactcgttgttcccgaagtataattgataactgccagttcttccggttcgtctttatgatatgcgacatgttctttacggaaattcttcggatattttttgccgaacatttcgttcagatgttcgcgtgcataagtcagtcgttcgctgcgtgacactagcagggtgaagtcgttcatcatcaggataccttccaatagcggcattgccgactcgttcaggttttcccataccatatctccaacaagcagtaacttggcttcggagtggttgacgatattatgcacattgtctgctttaaattcatggagaataggtacaataacggctccatacgttagtgtggcaaggaaagtaactccccagtgagagctgtttcttccacaaacggcaatcttgtctcccttgcggattccgctttcttcgaagatgatatggagtttctcgattttgcgagctacgtctttatactgtaaagttgcacctttataatcggtcagggcatccaggtcccaattattcttgatactattttcaatataggctataaaactttgttccattgttttttgcacatttggtattaaattgtgcaaatatagcaattatattaagaatgaagaattaagagtgaagattttttggaaatggagggagagtagtgggaaggaatttgtggacgatgcgttattggtgcaatggatgatgcttataattgaataaatgatgcttatggttgaataaatgatgcttagttggatgaaggcttataacaaaaaggattagcttgtgataaaatagattagctcatggcataaacagattaagttatgagctaaatgaatatcattatagctaaacaaattatcattatagcaaaacagattatcattatagcaaaacagattatcattatagcaaaacagattacgcttatagctaatttaattatcattatagctaaaaaaaatatgctattagcaaaaataattcagctaatagcatatttacagtaacttcatttcttatttcaagtaccattcgtacattctttgtatgccttcctcgatttcaattttatggtgccaccccaaagagtgcagtttcgaaggatcggtcagcttgcgcatagtgccgtccggtttgctgctgtcgaaggtcagttttccttgataacctacagtctccacaatacgctcggccagctgacggatggtgatttccttaccggttccgatgttgatgtggcagttgcggatatctttgctaccttctttataggtatctttgaagtctacgtgctccattacgaagacgctggcatccgccatttcttcgctccaaaggaactcgcggagtggagtacctgtaccccaaaaagtgacttccgtttcactgattccgtatttttgcagaatagccaggatttcttctttcggactgttgccgttgacaccttccaccggacgcaggttcatgtccttacgtacagcttcccagtttccttctttcagacagtgtgccaaatgaatcttgcgaatcatggcaggcagtacatggctgcgttccaagtcgaaattatcattcggtccgtaaaggtttgtcggcatcacagcgatgtagttcgttccatattgcaggttgaaactttcgcacattttcagtccggcaattttggcgattgcatacggctcgttggtatattccaacggtgaagtaagcaatacatcttccttcatcggctgttcggcatcgcgtggataaatacacgtactaccaaggaagagcaattttttcacgttgtgacggaaactctctccgatgatattctgttgaatttgcagattcttatatataaagtcggcacggtagatgctgtttgccatgataccacccacaaaggcggcggcaaggaatacatattccggctgttcttcatcgaagaatttacggactgccatgccatccagcaggtcaagttctttgtgcgtgcgacctatcagattggtatatcctttatcctgcaaattcttccagatagcagatcccacaagtccgtggtgtcctgctatatatatctttgcattcttttccattctatcttttattagttcaccacagaggacacggagggcacagaggaaaaaataagatcctccgtgtcctctgcgtcctctgtggtgaaatgaaattcatttaatgtttggtagcaatcattcgtttcactttttccatatcgtggcgaaccatgatacttaccagttcttcgaatgatgttttacgtggatcccaacccaacagtgttttagctttagtcgggtcgcccagcaattgttctacttccgatggacggaaatacttcggatcaacttctaccagagattttccggtagctacgtcgatacctttttcatttacgccttcaccttcccaacgaagttcgatgcctgcttctttgaatgctaacgttgcgaattcgcgcaccgtgtgcatttctccagtagcaataacgaaatcttcgggaacatcatgttgcaggattagccacatacattcgatgtaatccttggcatatccccagtcgcgaagagaatccagattacccaggtacagtttgtcctgttcgccctgtgcgatacgtgcggcagcaagcgaaattttacgtgtaacgaacgtctcaccacggcgttcgctctcgtgattgaacaaaataccgtttacagcaaacataccatagctttcgcggtagtttttagtaatccagaaaccatattgtttggctaccccatacggagaacggggatagaatggagttgtctctttttgtggaacttcctgcaccttaccgaacaattcggaagtagaagcctgatagatgcgggttttcttttccagtcccaggatgcgtacagcttcgagcatacgcaacgtgccgatagcatctgcttcggcagtgtattccggaacgtcgaacgaaaccttcacgtggctttgagctgcgagattgtagatttcatccggttgcacctgttgaataatacgaattaacgaactagaatctgtcatatccccataatgcagattaatcgtacgtttctgtttcatgtcgcgcacccactcgtcaaaatacaaatgttcaatacgtcctgtattgaacgaagaagaacgacggagtataccgtgtacttcgtaacctttttgcaatagaaattcggcaagataagaaccatcttgcccggtgatgcctgaaattagggcttttttcatacgctaattatttatataattgaaaatgtgggtgcaaatgtcggcattttttgtgacccagccaagtgactttccaattatttttcagcacagtcattcagcacggttttttcccattattttgtcgataatcaaagcgatagctccgtctcccgttacattgcaggcagtaccgaaactatccatggcgatgtaaagcgcaatcatcaaagcttgtgccgattcgtcgaaaccgagcatggattgtagaatccccagggaagccatgattgctccacccggaactcccggagcagctaccatagtgatacccagcataaagataaacccggcaaacagggggaagtcgaacggcattccttgcatcatcatcaatgccagtgcacaggctacaattttcagtgtactgcccgatagatggatggtggcacatagcggaatcacaaatccggctacttcagcagatactccgttctttttggtctgttccagtgtcacgggaatggtggctgcagatgattgtgtacccaatgccgtgaagtaagcgggcagcattttgctaagcaatttgaatggatttctatgcacaaacaatgccgcaatggaatactgaaaaaccaacaggaaaatatgaagaacgaagatgactccgataattttaataaacaccatcaggatagaatatacttgtcccgaatgtgtcatgttgaggaatatgccgaagatataaagcggcagcaacggcagaatgacggcacttatcattcgtacgataatttcctgaaaatcacgtgccacatttttcaatgcgtcgctgttgagtgacgccagtcctaaccccagtgtgaaagctaaaaccagagctgtcattacgttcatcagtggcggaatggagacggagaagtaggggaggattccctgcgcttcgcttacttcttcaagtggtgcacccggttcgatgagcgaaggaaatactgtgactcctgtgaagtaggagagaaagcctgaaaaaagagtagcgaagtaggcgatcaaagctgtcacgagtagcatttttcctgcgccttttccgatgtcggcaatagccacagtaaccagtccgacgataatcaatgggatagagaaattaagaaattcactgaaaatgccattgaacgtaacaaatattcgcactagcggagccgggaaaactgtgccgatggcaatacccaaaatgatggcgataacgatgcgtgccaacaaaccgattttgatcttcttcatccttgattttatttgtagaccacaaaaataatattttaatctaaaatattgcgaacaaatgtgcatttcaaatgttactaagataaagaatattcaaaatatacaagttatggcaaatcagaataaaacagatatcggacttatcggcttggctgtgatgggcgagaatcttgctttaaacatggagagtaagggatggcacgtgtcggtttataaccgtactgttcccggagtagaagagggggtggtagaacgcttcctgaatggtcgtgcaaaaggtaaaaacatcgaaggattcacagatataaaggcatttgtagattcgatagctattccccgtaagattatgatgatggttcgtgccggaagtccggttgacgaactgatggatcagcttttcccgttgctttcaccgggagatatccttattgatggcggtaattctaattacgaagatacgaaccgccgtgtccaactggcggaatcaaagggatttcttttcgtcggtagcggtgtgtccggtggtgaagagggagccttgaatggagcttctatcatgcccggtggttcggaaaaagcatggccggaagtgaaaccgattcttcaaagtattgcggcaaaagcaccggacggcactccttgttgccaatgggtgggtcctgccggctccggtcattttgtgaagatgattcacaacggtatcgaatatggtgatatgcagctgattgccgaagcctattgggtgatgaaaaagctgcttgatctgaccaatgaggaaatggctgatgtctttgcccgttggaacgaaggcaaacttcgcagttatctgatcgaaatcaccgccaacattctgcggcataaagacaaatccggaggttatctcattgataaaatcctggatgcagccggacagaaaggaaccggaaaatggtcggttatcaatgcgatggaactcggtatgccgttagggctaattgccacggcggtattcgaacgaagcctttcttcacagaaagacttgcgtcacctggcttccaagcaattccagtgtcaacatacacaacctatatataataaggcggaactcgtaaagaatatcttttctgctctttatgcttccaaactcgtctcttatgcccagggattcgccgtgttgcaacgtgcttccgacgctttcggctggcatctcgacctggcttccattgcgcgtatgtggcgtgggggatgcatcatccgcagtatattcctgaacgatattgcagctgccttcgaagccaccgacaagcctaaacacttgttgttggctccttattttaaagaagaaatgaagacattgcttcccggatggaagagcctggtggcggaatccatgaaagaagaacttcccgttcctgctttctcctctgccctcaactatttctattcgctcacttctgccgatctgcccgccaaccttgtacaggcacaacgtgattatttcggtgcgcacacttttgagcgtaaggatgagttgcgcggacagttctttcacgagaactggacaggccacggaggagatacgaaatcgggcacctataatgtttgagtaaacctataattcatatttagaaattaataaagtggataaatttgcaatgataattttcggtgcgtcaggtgatttgaccaagcgtaagctgatgcctgccctttactccctctaccgtgaaaaacggttgaccggagagttttccatattgggtatcgggcgtacggtctattctgacgataactaccgttcctatatattagaagaactacaacagtttgtcaagtctgaagaacaggacacagctcttatggcttcatttgtctcccatctctactatttaccgatggacccggcaaaagaagaaggttacccgcaactccgccaacgtctggttgaattgactaatgaggtagatccggacaatctgctgttctatcttgccactccgccatcactttacggagtagtgcccctctatttgaaagctgccggacttaacactccccactcgcgcatcatcgttgagaaacctttcggctatgatctcgagtcggcacttgaactgaataaaacgtatgcctctgttttcaatgagcatcaaatttaccgtatcgaccattttctcggtaaggaaacggcccagaatgtactggctttccgttttgccaacggtatcttcgaacctctctggaatcgtaactatattgactacgtagaaattacagccgtagaaaatctgggtatcgagcaacgaggcgggttctatgaaacggcaggtgcgctgcgggatatggtgcagaatcatctgatacagctcgtggcccttacggctatggaaccgcctgctgttttcaatgcagacaatttccgtaatgaagtggtgaaggtctacgaatctcttactccattgaatgatatcgatttgaatgaacatattgttcgcggacaatatacagcctccggtagtaaaaaaggataccgtgaagaaaaaggagtggctcccgattcgcgtacggaaacttatattgccatgaaactgggcattagtaactggcgctggagtggcgttccgttctacattcgtacaggtaaacaaatgccgacgaaagtaacggaaatcgttgtgcatttccgggaaacacctcaccagatgtttcattgtgctagtggcaactgtccacgggctaataaattgatccttcgtttgcaaccgaatgaaggaattgtgctcaaaatcggaatgaaagtccccggtgcaggtttcgaagtccgccaggtgacgatggatttcagttatgcacagttgggcggtgtgcctagtggtgacgcttatgcccgtctgatagatgattgtatccagggcgatccgactttatttactcgaagtgatgcagtagaagcctcatggaaattcttcgatccggtgctccgctattggaaagataaccccgatgcgcctctttacggttatcccgcaggtacgtggggacctttggaaagtgaagcaatgatgcacgaacatggggctgactggacgaatccttgtaagaatttgacaaatacagatcaatattgtgaattatgaaactatcagtttttccctcatcaattgaaacttcacgagcattgatactccgcctggtggaaatcatgaatgaagagccggacagagtgttcaatatcgcagttagtggtggtaatacccctgctctgatgttcgatttatgggcgaatgaatatatggaaattaccccttgggaccgtatgcggatttattgggtggatgaacgttgtgtgcctcccgatgattcggacagtaattacggaatgatgcgcaaccttcttttgggtatcactcctattctctatgagaatgtattccgtatccgtggagaggcaaagcctgcgaaagaggcggttcgttattcggagttagtccggcagcaagtgccgtttaagcgtggttggcccgaattcgatattatactgttgggagccggagatgacggacacacttcttcgatctttcccgggcaagaagatttgctgacttcaaactctatttatgtggtcagtgcacatccccgtaacgggcagaagcgtatcgcaatgacgggataccccattcagaatgcccgctatgtcattttcctgattaccggaaaaaataaagccgatgtagtagaagaaatctgtaattcgggagacactggtcccgcagcctatgtggctcatcatgcgcaaaatgtagaactgtttatggataaaggggctgccgcatatattgaagatcctaataaaaagatgagttagaacagaactatttcattgacgaaactaatagaaaaaaaagaaaaatatgaatccttatcaacattcatttggtggtaatatcccacaagacgtagcggggaaacaaggcgaaaatgttatttttattgtttatactttaaaagattcgcctgaaactcttgacaaagtaaaagatgtgtgtgccaatttctcggccctgattcgcagtatgcgtaaccgttttcctgatatgatgttcagttgtaccatgggatttggagccgatgcctggaaccgtcttttcccggaacagggaaaacccaaagaactgaaaactttcgaagagataaaaggcgagaagcatacggcagtttctactccgggcgacttattgtttcatatccgtgcaaaacagatgggattatgttttgagtttgcatctatcatcgatgagaaacttcaaggcgtggttgaacctgtcgacgaaactcacggtttcagatatatggatggcaaagccattatcggctttgtggatggaacggagaatccggcggttgatgaaaatccctatcattttgcagttgtaggagaggaagatgctgattttgcaggaggcagctatgtctttgtgcagaagtatattcacgatatggttgcgtggaactccttacctgtggaagaacaggagaaagtgatcgggcgtcgtaagtttaacgatgtcgaactgtctgacgaggagaaacctcaaaatgcgcataatgccgtcactaatattggagatgacctgaaaatagtgcgtgccaatatgccgttcgccaatacgtctaagggagaatatggtacttacttcatcggctatgcaagtacgttcactactacccggcagatgttggaaagtatgtttattggcaatccggtaggcaataccgaccgtttactggactttagtacagcagttacgggaacacttttctttgctccctcctacgatttgctaagtgaactgggcgaataaaaaataaaagactggggggagtattacactttagtaatctcctccactacatattggtcttttactttcttgcaggtacatacgaagaattccggatgtttcagagctccttgtaaagtatcaggaagaatcatttctttagtacgacggtccattgcaaccgttgcatacaggataccttcactcttgcatttctctattaatgcactttttagttcttctacgctatattccatttgtgtgatcctttgtcgctgcaaagttatggaaaatatgtatattttgtgcaattatattcctgtaataaataaaaaaatagctccctagttcgtccgccgacgagggagctattaacacaaaaactaaactagacttaactaaactattctattcttggaatttcacaatccctttctgttcgttgcaaaggtagatataaaacgggttttgacaaactataatcgacaaaattcacttttttaccgataaattcatgaataattagctcctttcgtcaagaaaagtctgaaaaacttgcttgtaactatcgctgataggaatatatgtcttgtcaaaaacaatacgcccgcgatcgatcacacgtatcttatctttttgtacgatgaatgagcggtgcacgcgtatgaaacggctggaaggtaaaagttcctccattgctttcatactcatcagtgatagaataggtttggaagcatcttccgtatatattttaatataatctttcagtccttcgatatacatgattttcttcaagtccacttgcaccagtttgtagtcacttttcacaaaaatactgtctatctcttccggtttctgcacaagttcgaaccattgaagggctttgttggcagcttgcaggaaatcgacgtaggagattggtttcagcaggtaatcgagtgcattgacacgataaccgtcgatggcatactgtccgaaagcggtagtaaacacaatgcgggtgtgcggatctaccatcttcgaaaactccaaaccattaagctccggcatctggatgtccagaaacaggagatcgacctcttcgccaggcaattctttcattgcctgaaccgcactggaatactttcctacgagttgcaggaacggggttttattcacgtaactctctaacaagctaagagctaacggctcatcgtcaacaattgcacaacgtaacatcatactattttatatctaaagtttttatattcaatgttttgaaatctactctctgatcttgatacttaatttcgattcatatactttttcatcttttgagatacctttcgaccaggtataagccccgggataaagaatctccaaccggcggctgacttgctccagtcccacacccgagccacttttatcctccactgtctttggatgattactgttgcgaatttcgcaaatcacctccttatcattctccgaaagatgaatactgatgaagctcgattcagtaggggagatgccatgcttgaaagcattctctatcaatgagataaagataagcggagcaataagcatctgactgtcgggctgaatatcaaatttagtaatcatctgtacattggccgacaggcggatgcgcatcagttcaatgtaatttcggataaaatcaacctctttacagagaggaacgtacgtttgttggttatcatataacacataacgaagcagtttgctcaactcctgaactgcttgttgcgctttgtccgaatcaaatgcaatcagtgcatagatattattcagggtattcagcagaaagtgagggttcagttggtttcgcagatttttcagttccgcttccgtacggtttcgttccgcttctttgcgggcagcttcattttgcgtccatcgcgcgctcatacggatagcggcacttaggccgatagtaaatacgaggctcaacatatctctaaggaagaatagccatcccggaggcatacccggtcttttggctttgggtgcaaatgacggatcgaatgtcaggctttgccagagatgtaacaaaatgccgatgacacataaaaagataatgttgtagacgatatatcttttggcctgactctgaaacagataacgggggacaagaatgaaataattcacgtagaacgcaatcataaaagagagtggtacagcaagatggcgtatataggccatccagttaatgttcccgtttccacgttcaacgaagaagaacgggaaaccgaacataatcccccagctgataatgtgtatcagtatctccaggggacgacgtgcggatgtaaaggtttgtttcataaagacaaagataatttttttaattgacaaccgacggttgtcaatcaattattcgtatctgatggcttctatcgggtctaaatcagctgctttcttagccggataccatccgaagaagacgcccgtaacggtacatactgcgaaggaaaggaatacactccacggctggatatagataggccaatgcgctacgctcttgacaatccagctagccccgcaaccgataatcactccgatgatacctcccgtaatactaatcatgatggcctcgataaggaattggcttagaatatcgactccacgtgcaccgacagacatacgcagaccgatttcacgggtacgttccgtaacggatacatacatgatattcataattccgataccacctactaccaatgaaatacctgcgatacaagccagcagggttgtcatcaaatcggtggttgagttgagcattgtactcaattcctgttgggtacggatggtgaaatcatcgtcatccgaagctttcagcttatggttgcgacggaggatcgtactgatttcgtcagtagcataatccgtcatatcttcggtaagggcagaggcaaacactccctgcaaatacgtaacggcaagcagacgtttcatcactgtggtgtatggtgcaagcactactgcatcctggtcttgtcccatggagttgtagcctttggctttaagcacacctaccacacgaagcggtattttactgaaacgaataatcttacctaccggatcacttccgtccggaaaaagattgtctactatagtctttccaatcacacatactttggccgaactctgtatgtcggcttcagtgaacatctctccgttttcaacagtcagctggcggatgtcgaggtattctgttccgacaccgttcacggaagctgggtagttgttgtttccggcaatgagttgccccgatgatgaaacattgggactgatggcggacaggaaacttgtctcatcacgcaaggcttcgtagtcggcaagcttcaaggtttgcatagcagacgggtcttggcggacacctccacgcatatcggctcccggatgaatcataatcatgttcgatcccatttcggaaatctgctgctggatgcttttcttcgaaccttgtccgatagccagcatcgtgatgacagaagcaacaccgataatgataccgagcatggtgagaaaagcacgcagcttattgttcgccaatgcccggagagctatcttaaataaattagttccattcataatgaataatttgctaatttgtctatatactaatggggcaatttcctgaaggtatagtcacccaacctgtttattgtacagcaatcggcacattagtatatcggcacattgaataattattaatcctcgtcgtttttcggcaatgcggccagcgcttcggcagcagacagaattttcggattggttgtatcttctataacctgaccgtcacgcagacggatattccggctgctatattgcgaaagttcgggattatgtgttacaaagataatcgtacgtccctctgcatgaagcttttgaaacagtacaagtatctcgaaagaggtacggctatcgaggtttccggtcgcttcgtcggcaagaatcactgccggattgttgaccaatgcgcgtgcgatggcaacgcgctgcatctgtccaccggacatctggttggatttatgttccagacggtcccccaatcctacagcctgtagggattcgatggcgcggcgacggcgttcggaagcgctcacggcagagttgtacataagcggtagttccacattttctacagccgtcgttttaggtaacaagttgtagctttggaacacgaagccaatcttccggtttcttagtactgcacgttgaggcttgctcatcgtacgtacgggaatatcgtcgagcagatattctccactggtcggggtgtccaggcagcctaatatattaagcagcgtggattttcccgaaccggaagtccccatgatggtaacaaactctccttcattgatattgaacgaaacgcctcgcaatgcgtggacggtttcgtcgcctacctgaaagttacgtttgatattttgtatttcaattacttttttcatcgtaaataatgtgttaatgtgccaataacggattggcacattgaataattattttttcttcttacttcccggagggccaggcatgaacggacttctttctccgccactttcctgatttccttcagcagccacattttcaccgggcattgctcctatggtagcttcggtcactacttttgttccttcggaaatgccactgataatttctgtagatataccgttgctgattcctacttctaccggatgagcggtgaatgtggttccttcacgagtccagagtttatgttcgccttcgcaatcttttacgatgtcattattaccgattaacggtttttcaggtgtgaatcgcagtgctttgttcgggacagacaacacatcctttttatcaagaatatagatcgtgacattagctgtcaaacgaggtttcagtttcaaatcagggttgggagcagagattacaacttcataagtaactactgtagtggtggtgcttgtactgctcgtactgcttgcatctcccagacgaatttgtgtaactacgccttcgaatacatcattcggataagcatctaccgtgaagctggcacgctggccttctactacaccgcctatatcagcttcatccacatcggctactacctgcatctgtgtcaggtcggcagcaatggtgaacagtgtcggagtttcgaatccggaagcaacggtttgtcctgcttccacatcacggctgatgactactccgtcaatcggtgaggtgatagtagcataagccaagttacgttctgcttttgcgagcgatgccttactgctatcatagctacttttcgctttctgatagttgtagagggcctgttcgaaatccgtatcactaatcagtgacttttcgtgtaagcctttgctacgttcataattcttcttctgatattcatattcggcttttgcaccatcgtacgttgcctgttgtgatgccaattcactttgcaatgtggcacggtccatttcggcaatcaactgtcctttggttactaccgagttgtaatctacgtaaatcttgtcgatgataccggaaacctgcgtaccgacttctacttccgtcaccggttcgatggttccggtagcagtgaccgaatttgaaatatcgcctttgctcacgttggcagtggcgtaggtgactttgtgtttggccggtgaacctgcaaagaaccagattcctgcacctgctaccacaacgactgccacagcgattaagataatctttttcgttttcattcgtttattatgcttttatttagattgctaattgatctccctgatagaacttcagcaactgcatattcagtatagccatatatttggcttgaagctgttcctgctgtgcttgtagcaagttgttcttttcagtaagaagttctatggtattcttcattcccagattaaactgttcgctaattaactcatagctgatttgtgtactcttcaacttctcgtttgctgctgcataacgttgctgtgcactgttagcatccagccagagtccttcgatggtcttgtacagagttttttgttcgtcaagcaaggataacatgctcgtctcgtattgcaattttgctttctgtacggcacttttagtttgacggttattgaagatcggcacactgacagacaatccgatcgaattgttccatccgtttttcacttgctctccgaaagtgaagtcgctgccgctggtgtggttggttccgattcctgcgctaaggctgattgtgggcaaataacttgatttggcaataccgatacccagttcggaagcctctacattaagtttgctagcttcaatctctgggcgaagactcaatgcacgaatgtacacatcttttttggtaggcaacggagccagtacattttcgtcggacagggcagggaggtagatgttcatttcattctccccatccagttcgagcaattgtttcagttgtaatttgtaatcttcaagagtggcttgcgctgtgacaagttggtatcggtctgtgctcacctgtgcttccagttgggcgaagtcgcttttagcaatacttccggcgttcagaagttcctgtccgcggtcacgctgcgcaatagagacttgcagggtactttcgtttactttgacagactcggctgcataaagaatctggatatacacttgggcgatagattcctgaatgttattttcggaagtcgctacgtccagttcggctacctgattgttcaacttttcctgctggatggttttcagtcttttattaccattatatagagtccacgacgcattcagtccataattaccattgtagctcgttttactattgctactgataatttcgctgccgcttacccgactactcgtctcctgatacggacgattcaccacctgctggctggtagagaacgaaagactgggaaacaaggcagccttagctgtctttacatcaatctgcgtgctggccgcagtgatccggttcttgcgaatcgtgatgttctgctcttttgcgtagtcgatgcatgactgcaaatcccattgagccggaattttcgtttctttcagcgtatcgacttgcagcggagaaacttgggcagatatgccggacagcatacctgctccaagaaatgtcatcactgtcaatcttcttacatttatcatattcatacttctattgatttactgttagcgaaggtacgtacatattatatatgccgcaaaaacgatagacggatgacgtaatttcgccgttaaatgttttttttctgtcgataggcaggtttttgaagaaaaacacaacaaatcacacaacttttttgactagttgtttgttttaattataaaaaatgtatatttgtactcattacaaattataacgtcaacatatgaagaatacactgcttacgatctggaacttctatttggagggcttccgtagtatgaccttggggcgtaccctgtgggttatcattctgctgaaattattcgttatgttcttcatccttaaaatgttctttttccctgatttcctccgtgaccatcctacggatgacgacaagggaacatacgtgggaaacgaactgatagaacgtgccatccccggtaaatctactgatttttaactcttaaactacataggattatgattgaaagtattgacacctcgctgatcgattggtcgagagcccaatttgcgatgacagccatgtaccactggatttttgttcctctcacactcggactggcagtggtgatgggaatcatggagacgctgtattataaaacaggcaatgaattttggaaaaagactgcccagttttggatgaaactcttcggtataaactttgccattggtgtggcaaccggtttgattctggagtttgagttcggtacaaactggagcaattattcgtggtttgtaggagacatcttcggtgctccgttggctattgaaggtattttggcattctttatggaagccacatttatcgccgtcatgttctttgggtggggcaaagtaagtaaacgtttccacttggcttctacctggctcacaggcttgggagctacgatttccgcctggtggattctcgttgccaacgcatggatgcagcatccggtaggcatggaattcaatcctgatacagttcgtaatgagatggtagatttctgggcagtggctacgtcacctgtagcggtcaataaattcttccatacggtattgtccggctgggtgctgggtgctatttttgtagtcggcatcagttgttggtatctgctgaagaaacgtaatcgtgagtttgcgcttgccagcattaagattggggcgatttttggattagtagcatcgttgctttctgtttggacgggtgatggttccggttatcagattgcccagacgcaaccgatgaaactggctgccgtggaaggtctgtatgaaggcggcactaatgtaggtctggttggaataggagtgttgaacccggaaaagaagacttacaacgatgggaaagatcctttcctcttccgttttgaaatccccagcatgctttctttccttgcagaacgtaatgtagacggctacgttcctggtattacaaatatcatcgagggtggttatcaacagaaagacggatcgacagctctttctgctgccgagaagatagaacgtggaaaaacggctatcggtgcattggctgcctatcgtgcagcaaagagtgcaggacatgaggaagatgctcaaattgcatataaagtattacaggaaaatattccatatttcggttacggatatatcaaagatgtgaaccaactggttccgaatgttcctctgaacttttatgcattccgtgtaatggtaatcttgggcggatacttcatcctgttctttattgtcgttctcttctttatctataagaaagatttaagccagatgcgttggatgcactggattgctctgctgacaattcctttgggatacatcgccggacaagccggatgggtggttgccgaatgtgggcgtcaaccgtgggctatccgtgatatgctgccgacaatggctgccatctccaaactggatgtaagctctgtacaaacgactttctttatcttcctgctcctgtttacagtgatgctgattgcaggtgtcggaattatggtaaaggctattaaaaaaggaccggagaattgataattacctattactcattacttaatattttagctatatgtatatatttttgcaacaatattggtggcttgtcgtttccttgttaggagccatactcgtgttcttattgtttgtacaaggaggtaattctttgttgttctgcttgggtaaaaccgaggaacatcgtaagatgatggtgaattctaccggacgtaagtgggagtttacgtttactacattggttacatttggaggagctttcttcgcttctttccccttgttttacagtaccagtttcggcggtgcatattggctttggatgattatacttttcagttttgtattgcaggctgtcagttatgagtttcagagtaaggcaggaaatctgttaggtaaaaagacatatcagactttcttggtgattaatggggtagtgggtcctgtgttacttggcggggcggtggctactttcttcaccggttctgatttctatattaataaggccaatatgacagacactattatgccggtaatcagtcattggggaaatggctggcacggattggatgcgttgacgaatatctggaatgtaattctcggattggctgtcttcttccttgcccgtgtattgggagcactctatttcattaataatattgatgacaaagaactgactgacaaatgtcgtcgtgcagtacgcaataacacagtcttgttccttgtattctttttgtcgtttgtcattcgtacattggtgtccgaaggctttgccgttaacccggaaacacaggagatttatatgcagccatacaagtatctcacaaactttatcgagatgccggtagtgctggttttattcctgattggggtggtactggttcttttcggtatcggaaagacattgcttaaaaagacttttgataaaggtatctggtttgcaggaatcggtacggtactgactgttttatctttgctactggtagcagggtacaacaatactgcctattatccgtcatataccgacctgcaaagctcattgacattagccaatagctgctccagtgaatttacactgaagacaatggcttatgtttccattcttgttccgttcgtgattgcttatattttctacgcttggcgtagtatcgaccggcataagattaccgagaaagaaatggatgaaggaggacactcatactaatatatcatttgtatattagtcttttgtctgtgtactaataactttgtccatacacttatacattgtccatatagaatttcgaaatagagattctagtcggaataaataaactccccttatttaacatcactctaagtcatggtagagagatgaaataaggggagctttttatatattttatacttaacgtgtgtgcctaaacacttcgggcattatgacaccctcgttatgaattacactaatgctaattatttattgactacattctccggtttgccagaaatgtaagcctgaagattgctgattgcaatattcatcagacgttcacgagcctctatggttgcccaggcaatgtgcggagtgatgtagcagttctttgctgtcagcaatggattgtcggcacaaggcggttcggtagaaagcacgtctacgctggctgcataaatcttaccgctgttcaaagcatctgcaagatcttgttcgttgataagcggtccgcgaccggtattgattaagatagctgtcggcttcatcatagcaagacggcgtgcattcaccatttcgcgtgtatccggtgtaagcgggcagtgcaaactgataatatcgcattcgctgaacaattgatccaaatccatctttttgatttccggtggcaactggaagtgagatttagaagtcaatgcgtacacttgcataccgaatccgatagcaacacgcgctgtggtatatccggtgtttcccaatcctaccagaccgattttcttatcccgaagttccatcaacggagtgtcccaaaaacagaaatctttgttgtttgtccaacggcctttgtgcacttcttcggagtggtgttgcacttgttgagtgatgttcaggatatgcgaaaataccatttgagcaacggaagcggtgctgtatgaaggaatattagtaacgacgattccccgttctttggcagcagctgtgtctaccacgttgtatccggtagccaatacaccgatatatttcagttcgggcagtgcagccatgtggtctgcattgatgattaccttgttagtcagaattgcttctgcaccggctgcacgttctaatacctcttccggagctgtacgatcataaattgtacattctccaagaactttcataccttcccaggataaatctccgggattggcggcaaagccgtctaaaactacaatcttcatttcaatttcaatattaataataagttatacgtgttttcttaacaacatattgatattataggcgcggattacacggatttcacgttttcttaaaatatgctttgcatgaagcatctgcgtaatccgtgtaatctatgcctgaaaatatcatttcttgaatttgtctccccacaactgtatcatccgttcggcatgcttctgctctgccggattgttttgcggttgccatatccgtttgtctttcagttcgtccggaaggaattgctgtttgacaaagttaccttcatagctgtgtgcatatttatattcctgtccgtagcccagttgcttcatcagtttggtcggagcattgcgcagatgcaaggggacaggcagattaccggttgaacggactaactccagtgcgtcattgatcgcgctgtatgccgaattactcttcggactggtagccagataaatcgttgtttcagccaaaggaatccgtccttcgggccagccgattttcatcaatgtttcaaagcaggcgttagcgagaagcagtgcgttcgggtttgccaaaccaatgtcctcggcagccgaaatcaccagtcggcgggcaatgaaagcaggatcttcgcctccttccaccatacgggcaagccagtagatcgctccatcgggatcactgccacgaatagacttgatgaaagcggagataatgtcataatgcatctccccatccttgtcgtatgccagcggattttgttgcaaccgttcggtcaccatttcatcggtgatgacgacagtctcttccgtttccgattgcacaacgagttccaatatattaagcagcttgcgggcgtctccaccggaaaaacgcaacatggcggttgtttctttcaattcaattttgcgctctttcaatacggcatccgtggtgatggcacgttgcagaagttccaataaatcttctttctccaaagatttgagcacataaagctggcagcgggacaggagagggcggatgacctcaaacgacggattctccgttgttgcgccaatcagcgtgactgttccgttctctaccgctcccaacagagaatcctgctgcgacttgctgaaccgatggatttcatcgataaacagaatcgggctggactgtgaaaagaagcggttgctcttggcacgttctatcacttcgcgcacatccttcacaccggaagtcacggcacttaacgtatagaaaggtgtttccagtttgttggcaatgatttgcgcaagggttgttttacccactccgggaggtccccagagaataaacgaagagatgcgtcctgcgtcaatcattttccgcaagatagcccccggtccaactaaatgtttctgaccgatataatcatccaaagtctttggccgtaaccgttctgctagtggttgcataattttttagaataccattaataccatgaagcggataccgtttttgttgatacccggattatcacgataagtgaaacgatgtacatactcaacgtgcagcaacttgaaaatgttgtagatacctacacttgcttcgacatacggcactttcgggtccatcacgaaactggtgaacttaccgtcgcgtgtcgggaaacggaacaaatcgggattgttgctcttgaacggattattcttgtccgtcaatgttccccacaaagcacgtacacggaacatttccctccatttcaggttcttgataagaggaatacggttgaagagttttccattcatgtcgtatgataatgacatggaagcgtaacggtcgttcaggaattccatgttattaatcaagttgaacgtttcgcgctgggtgatgtaggacaagttggcttccggcaggattaacaacgggaaaggaactgtgttccattctgcacctgctttcacgctgcaatcaatctttccccaggaagccgggagccagaaacgtttccacacacttgcttccgtgcggttaaagttataatccccgcccaatactcctttgaaacccatagcatgagtgagcgtaaagataggagcgtccagcgacacaggcacgcggcgttgcttggagttgacaaatgattcgcccggcgcatagcgcagcgtcagacttgcttcggaagtcgtgacatcgtgcacacgggtttgtgcggcatcattgcgcaggtattccagtttgccggtaggctcgtcgttacggtgtcgcaacatggctttcactccgaatcccgtcagcgtttcgagttcataattaatggtggcgtcgcgcatatacgacatttggtctactgtcgttgtcttgaccgacaggaagatattatctttatccgtaaacaggaatttgtccatcggagacattacatcataactgtatgttgccgaaagataatgtttcgggaactcccagaccacataatcgcgtttgttgaacgaataagtcaccgttccgctatatttccagcgttcgtctttcagaccgtacgctccgtatccgctcaagaaccagtgcttgtcgaaatgagccgtagtcataccgctcaaccggaaacgggtaccatcaatgtaattgctcgaaatcatggtgttgatagggccgatgtccactttgctcggatgctctttgcttcctgtttctacaaagttctcaatcagtgctttcgctccgaagatgatgtatttgaatcccggaatctgttcgagacggttgacgaatacatccatcgaactttctttctttgtcaatggtacttgacggacactcgcccagtactcatcgcttttcgagagcatatccgcttcttttatcacgctgcctttcaaccggaacagtcgttgttcaataggatcgaatttataattactatatttcgtggttcgttccacctgcaatccacctgctgttttgttggaattccaggaaaggtctacggtcatgtcatcatccgccaatacccagttgccgttgggcagttgctcatactgttgcgtgatgtccatgcggttgacaaagttgactccggtctttttaggcaggttcatcgtgcatttctgaacggcgtatgtagaatcgttcaatacatacagatggccggtgaatccgaagtcctgcgagttttgcggaacaaaagtgaggtggacacattcgcgtttgtttaccatcaatgtatccatcagataatatttataaaatgagatggcattgttaccgatcggactgacgaaacgctgctgaagcaaccggatatcatcatcgtagatattgatgtcggcaaatacgtctttcaatacggtaccgagcatatctcccgtagagaaaaattcttctataccattggagttctttcctttgataatcgttttcttgttttcgggatttttgcggtagatggtttgcgaggacgtttcctgtacggaaatagggagaatcaacttattggttgtttccgacacttccacttggtctcttaagaatgaatattttttgtagatacctttttcaagcttttccggtgtgaggtcgttgatagacattttcatcttctcgtacttgtcgtactgatagtactcgttcacttcgaggacttgtgcctttttgtgttcgattaccttcttcatgaattccactgccggattgttcttgcgggaatatttctccttttgaggtttcacgacaacctcgttcaggagcacattatccggagctaacttaacgttcactgtctgattgttggaaccaacccgaaccgttttactgatataacctacagcggagaacaccagtgttcctccgtttctgcgggtgtcaagactgtattctccgtcaatattggtgatggtacccatatctctcttttcctggtagtaaacagagatatacatcaatggctcgtgggtaaccgaatcagtgactacccctttaatttgctgtgcaaaagcattggaagctaccaatacgagtaagaacagtataagtattttgttatatcgttgtatcataacgttcgtagtagggctgcaaagttaacaaataactctaaggataacagaatatataactttttttacccatcgttttttgttgtttacaagcatatatcgtccgataattcaaggaacatcccgctgttaatccttttgataagggcatttccgcatttcattctcccggttccggtatttgaaacctttgctcctgttgtagggcactttttgtttcgacccttgaaactttttgtttcccggcatgaaactgttggtttctcggtgtgaaacactttgtttctcggtgtgaaactattagtttcaaggcgtgaaactaacagtcccatgccgggaaacggaatggaacatgccgggtaaatgttatttgctcgtaagtatctgtacaatacgctctgcggtacgtccgtcccaacgttcgggaagttcgccacgtttccattcaccgtgcatcagtgtatccatggttttggcaagcagggcaggatcttctccgacaagttcgttggttcccatgcgccacgtttccggatgttcggcatacgtgttgagtgtgatacaaggaatacccaggaaggtcgcttcttcggctacgtttcctgaatctgttatgattcctttcgccttgtttatcagataaccgaagaacaggtagttctgcggcggcatgatatggagattcggagcttcgatgtccaactctttgatggcattgcgcacgtaggtgtgcagcggtgcaacgataggcataccggcagacttgtcgatgattgttttcatcaactgacgcagattctccttattgccgagtaatacacgacgattgagagtaaataggagataatttccttcttgcagtcccaagacggagaaccatatcggtttgagcaagcggttccggttgtagcggatggcatcaatcagaatgttgcctacataatatacgttttcgctttccgttcccgtctggttcaggttgcggttggcaaccataccggctgtgaacagatagtcggatagtccgtctgtaatcatgcggttgacttctttcggcattttcatatcgaaagaacgggttccggctacgagatgcgctaccttgatgccttgtttcttggcaacgatggcacaactcatggttgcggtcaagtcgtctaccacaaggactacgtgtgccggattttccgtcagttcttgttcaaaggctaccatgattccggctgtcaaactcgttggattactgctttccactcccagatatacatcaggagctttcatgtcgagatccgaaaagagagaagcatccagactcgtatcgtctttcctcccggtataaaccagtcggtaagagatacttttacccagcgcccgtgcggcttcaatagcgcgtgtaatgggagctatcttcataaaattggggcgtgcccccgcaacaattgttattttcatattgtttctacctaattcggtttaattcgtgaagcaaaagtacattttcttacggaatttattcgttactttgcatacaaaataacaaatatatgcccacattcgttcaaattcttgattttataggcacatttgcctttgctattagtggtatccggctagcttcggcgaaacgtttcgactggttcggcgcttatgtggtaggacttgctacggctatcggcggcggtactatccgtgatgtgctgctcgacgtgacaccgggatggatgaccgaccctatctatctgatttgtacaggactggctttgttatgggtcatctgtttcggacgctggctcatccggctcaataatactttcttcattttcgataccatcggtctggcactgtttaccgtggtaggtgtaggcaagagcattgctctgggttatcctttctgggtggcgattatcatgggtagcattacgggagcggccggtggggtcattcgtgacgtatttatcaatgaaatacctcttatcttccgaaaggagatttacgcaatggcttgtgtcgtaggcggtattgcatattggatttgcgatctcgcaggtatggagtcctacgcttgtcagttgattggcggatcagccgtatttctgactcgcatcttagctgtaaaatatcacatttgcctgcctatattaaaaggtggggaagagccggaagaataaggatggcattatttttcctcctttatatccagttctccttgaaaactaatggactgacggttttgcatattgacatcgatacttgccgaaccattgggaaatactttggctctgaattcatatctgtcttcaggattacgtgcgacgaacttgataacggcattcccttttttatccatttccacattatattctttgaggatggttttgaagttaagtccgtcacctccgccatacggaatgctataagcccgtccataataaggcaagtaagaaataaccgaatcatttctgattgtcagtgagtaggaagatgtcaaagggatggagcgtccgcgcatcggcatggcagtgttgacatctatcttgtaattttcagattcaattagtttcattactgcttctttcttctgttccttcttttcctttttactttgttgagccgaaagggtagggatgcccactagcaaggctagtaacagcataaagatttgcttcttcgttctcatatcagtttgcatttaggttgatgtatatatgtataacaatcaaatatactaaaaagacagggatacttctgtttcttttaatgaaaattaaacagaaccccctgttatttatgagtttagcccaatttagaactgttccagtatttcaattcgtttttcaatgggaggatgagtggcaaacaatccgttgattccgctgaatatacttttcgatttctttttaggattctgtataaataattgcgccacgtctttcctttctactgcctcgatggcaggatctgccgatattttgcggagagcgctggccagtgccaacggattcttcgtcatttctgccgatcccgcgtctgccatgtattcgcgtttgcgtgaaatggcaaaacgcatcaggcttgagaaaagataaccgatggcggctatcactaaagcgagtagaatgaaaagaaaaatgccgccactacctttgctgttgctgcgtacacgtatgtgcgtgatggtatatagggtgatttctgtcagcatggagaagataccgacaaatacgatggatattatcagcaagcgcacgtcacggttgcggatatgacttagctcatgtgcaatcactgcttccagttcttcatcattcagttttttgatgataccttccgagagggtaacagtgtatgtacgttcattgatgccgcttgcaaatgcattcagagaactgtcatagatgatattgattttcggcatcttcatgccttgcgacatacataggttttctaccaggttgtaaacgcgcttattctctatacgatccagcggtttggaaccggtggcagaattgataatgcttgtgttggcccagtaggcaatcagaaaccagatgattacgattcccatggtgtatggcaacgaagagagaaagaaatgattgaccattggcattatttctatttccatactctttccgtatccaaaaagaaccaacaggtagcaggataaatagaggagtgctgccacgagacagggaaacaggaacagtagaaacgcagagcgcagattattccggctctgctgtgtttggattccgacgtattgcatgcgtgttcaacttttgtaattgagtggacggtgtgaataaagagtttagaaacttattttaggtgcctgatccagattcgcacgttcattcttccccaggtcgaacatgatttctctttggaatccggtcattcctgctactatattcgatgggaatgtctgtacggcgttattatattctttggttgccgagttgaagtaacggcggacagcagccagtttattctctacatcagcaatttcttcctgtaattgcaggaaattctgattagctttcaaatcgggataagcctcgagagtgattttcaatcctgcaagagcagagcttaactggttttcggcagctatcttatcatcaatcgtttttgcgccgactgcaccgttacgtgcctgaatcacccgatcgagcgtttccttttcgtgtgcggcatatcctttcacggtgtctaccagttggggaatgagatcatggcgttgtttcaactgtacatcgatgtcggcgaacgcattttcacgattgtttctcaatttcactaatgagttgtacatggaagcaaagaagatgcccagcaatacaataatccctacaataataagtatggtcatagctttttgttttatttaataatataaaatcaaaagtaatctatttggttcttttaaccaagtagtagggggtaaatttcgctaataccacctaaaaactgtcagaaagcacccaaaatctgtcaattgatagaatttcaccctaaaaaataacggatcctaccctgcttgataagcaaaatacctttaaacttgcaaacatcgagaaaaacgaaatattaaccataaaaccattaaagtatgaaaagtttaagtttcagaaaagatttaattggagtacaggaagagttgcttcgttttgcttataaattgacggccaaccgtgaagaagcaaatgacttattgcaggaaacatctttaaaagcattagataatgaagaaaaatatgttccggacacaaatttcaaaggatggatgtacactattatgcgtaacatctttataaataactaccgtaaagtagtacgcgatcaaacttttgttgacacaaccgataattattatcacttaaatctgccacaagattcaggatttgaaagtacggaaggtgcttacgacctgaaagaaatgcaccgcatcgtcaacggactcccccgggagtataagattcctttctctatgcacgtatctggttttaaataccgcgaaatcgcagagaaactaggattaccattaggcacagtgaagagccgcatattcttcacacgtcaacgtttacaacaggaattgaaagattttgtataaatgaggataacgcatacaaacaagcttattagcagaaggagcaaagagaatctatctcttcgctccttccttttttataacctattttatttacgattagatgatttacgatgtacgattgaagtttgaattgtgaatgagggaatactcatgcaaagataagtacttatgattccaatagttgtttcaatcgtacattgtaaatcgtctaatcgtaaattaaactaggttataaattctttcttgttatttgcttttcttttttttgctttttttcttttcaacggccttctcgtccggtgggaatttaggaaccagattcatcagccgtaatatctgactttgtcgttttagtatgtatgacgaaggtttcgccgagttaaatcgtatcgggttgggtagggtggcggcgatgagcgcgcattgtccccgggtcagcttgtcggctgttgttccgaacttattttttgcggttgcttgtgcaccgtagatgccatttcccatttctatagagttgagatagacttccataattcgctctttcgaccagaagagttcgatgagaaacgtaaagtagacttcgagccctttgcgtacccacgacgattgcggccataagaacacattcttggctgtctgctgactgatggtgcttgctccccgtttccgtttgcgtgtttcgttttctttcatcgctttcttgatttctacgaggtcgaacccgttgtgttcggcaaaacggttgtcttcggaggctatgaccgccatcggcaggttgggagatatcttatcaaaagaaacccacgtgtgcttccacgtgggtttatctcctgaaaaaacttgctgaacgcttcggataaccatcaacggagttacataaaccggcatgaaacgataaataatcactgccagtagcgttgatgcaaagaagaaaatcagcaggttgcgcgtatagcgcagtaattttttaatgagtagctgcttgtgcatctttaatcatttgctcacttgcgtacatgtatacttctacacgacggttttgttcgcgaccggcagcagtgtcattgcttgcaacgggatcgctttcacccattccttgtacactcttgatctgattggtggaaacaccgcaactcaacaagtaactggacacactttgcgcacgttcttgtgataagttcaggttcttttgctggctttgtgcagcagtactgttcttccagccctggttgtcggtatatccgtagatagacacgtccatatcccggttctggttgagcacattgttggcaaacttgcttaaagcagatttagcagcagcacttagatttgcattaccggtagtgaaaagaatacccgagtcgaatgttactttcacggcttgcaatccgttgttgtctgttatctgttctacttgtgcgccttcaatttgttttgcttctgctgctgctttgtccatcttcttaccgataagagcacctgtacctgcacctactgccgtaccaatagcagcaccgatagcagcacctttacctttaccgataacacctcccaggatcgcacctagtgcagcgcccgaaccaccaccgatagcagcacctttaccagtgttgttcatacttccacagctaccaaatatcatggcaatactcatgaagagaaccataaatttcatcttgttcataatgttgatgttttttaattggtttataaaaaatgtttttatacgaatcacttcgcattattaataacaatgcaaagatacatattatttggcaagcgtgtactttttaagttaaaataactcggatgagtccctttgtttgttaataaagggaaatgataattatccttttatcgttgaaggaatactcaaacacttctttttaataataatgaaccaactcaaaagaattaaccctttggcaaccgtggtgatgcagactgcccaccagattccttccactcccatacccatccgtacaaacaggatggcaagcggaatacgcatatagttgcaactgatgctgataatagcaggagggatggtgcgtccgatgccgtagaatactccctgcatggtgatttcgagcatcataaaaagttgcgaatatccgtcgatacggaggaacacacctccggcttcgtaggccgcctgttcggggacgaatatggcaaaaacttcattcccgaagaaaacgaatagtaatgtgcagaatgtaccgaagattcccgtcatccataaagtcgtataccaggctctaagtacccgttccactcgtccggcggcgtagttttgggcgatgaaggcacttagagcggtggagaatccctgtgaggtattccaggtgattgcttcaatttgccctccggtggtgaaagtcatcagtccgatgtgccctccctgttccgaggcggtgcggcaaaggaacatattgacgaaagcaaatagcgtattcaaagtagctacgggcaatcccagtttaaagattctccgtgtatattttttctttagccgcgtgaagaaagggaaaccgccaagcagggcatcccggcaacgcaactgataaacgaaaatcaggaaaacacttgcttccgcaatccaggtagcgtatgccgcaccattggttcccagcccgaaaccgaaaatgaagagcgggtccagaatgatgttcagtatcaatcctgtgccgctgataaagaacgggactttactgcgccctgctgcattataaattccggtgaaggcggcggagaggaagacaaaaggtaatccggtagaaacaatccgcagatattggatggcattggccgtaatatgatcctcgagttcatagatgcgtatgataggttctgcaaatataaaaaggagtgtgccccaacagatggaaataatcaaagcaatcgtgatgttatgagacgcgaaactgcgggcatcttcctggctttgcgcaccgatggattgtccgacactcacttcagatcccaccttatttaataaggagatagaaccggacatccaggtcaggattccgacagaaccgatggcggctacggcttcacttcccagtcgtcctacccacgccatatctgtgaggctatatgccatttggataaacgacgttgccatgatcggcattgccagattaaacagttgacgattgatagggccttgtgtcagattctttattccttgcatataatttttctaatcaaaatggggtgcaaagatacgcaaaattactatcttcgcgcatctaattattcattaatcaaagtacatagatactatgaaacagaaattttctactatttttatcttgctgcttctcttttttgctggttcacgagtggtagcgcaaaatgttccgaaaccttttgatattgaacaaccttcacttcgcgtattccttcctgcgccggaactggcaacggggcgtgctgtggttgcgtgtccgggaggtggatattcacatttggcattcgaacacgaaggctgtgattgggctccctactttaataaacaaggtattgcattgattgtgctaaaataccggatgccgaacggtgatcgtacattacccatttcggatgctgaagcagcaatgaaattggtgcgtgacagtgccgatgtctggaatttgaacccgaatgacattggtatcatgggctcttctgccggtggacatctggcttctaccattgccactcatgccaagcccgaacttcgtccgaactttcagattcttttttatcctgtgattacgatggataaatcttatacccatagaggctctcacgacaaccttttgggaaaagatgcttctgctgaattggaacttgaatattctaatgaaaagcaagtgacgaaagatacaccgcgtgcttttatcgtatatagtgatgatgataaagtcgttccgcctgctaacggagttaattattatttggcgctgaacaagaacaatgttccttcagtgcttcatatttatccttccggtggacatggatggggaattcgcgagggtttcctctataagaatgaaatgttggacgaactgacgtcttggctccgtagtttcaaagtacctcataaagatgctatccgtgtagcttgcattggaaatagtattacgtatggagcacgtatcaagaatcgtgatcgtgacagttatccggctgtgttgagccgtatgttgggagaggcttattgggtaaagaatttcggagtcagtgcccgcactctgctgaacaagggcgatcatccttatatgaatgaaaaggcttatcaggatgcgctggctttcaatcctaatatcgttgttatcaagttgggtacgaatgacagtaaatcattcaactggaagtataaggccgacttcacgaaagatctgcaaacgatggtcgatgctttcaaagcgttgccagctcaaccgaagatttatctttgttatccttctaaagcctatcagaccggtgataatatcaacgatgatatcatctctaaacaaatcattccgatgataaagaaggttgccaagaaaaataacttgtctgtcatcgatcttcacgcagcaatggacggaatgccccagttgtttccggataagatccatccgaatgaagaaggggctaaagtgatggcaaaagctgtttatcagtccttgaaaaagtaaaataaggaacttgacgattgtaaaatttccggttgaaataatctcttttagagaaagttttaaccggaaattttttagtttaatcacaaataatcttcttataatatgctaaaaaagtgtctttctgaaagttagatttgttaccaatctatatttttgcgcccgaaaaataataaaatgataaatagcgttatgaatagactacaagattttacctttttctcgcagttgatggctaacgctaatatgggatggtggaaagccaatttatcaactgcgaattatgaatgttctgactttatagtagagttattaggtctggatcagaccggagttattagttttgaagatttcaataaacgtattcagaaagaggaacaactttctacaacagttcattcttatggtgtgtatcaacggccggaggtggtgtatttgcttgatacggtgaaaggagctgtttgggtacgtagcaaggtatgctttcaagaaacggatgaagacggaaacgaaatcatttatggtatatccgaagtgcaagatggtcctgatatggcatctgcttaccaagctttgcaatacagtgagcgtctcttatctaacattttcaagtatttgcctattggtatcgaattatacgatatggatggggtattggtggatctgaacgataaggaattagaaatgtttcatatagagaagaaagaagacgtattgggtatcaatatttttgataatcctatttttccgaaagaaatgaaagaacggctgaagaaaaatgaagacgccgactttactttccgttatgacttctcgaaggtcggatcgtattatcagaatacccaaaaacagggtacgattgatctgatgactaaagtgactacattatataatagtgagcatcagccaataaactatctattgattaatgcggataagacagaaacaacggtagcctataataagattcaggagtttgaggagttttttgaattggtcggtgattatgccaaggtcggttatgctcatttcaatattttgagtggacacggctatgcccaaaaaagctggtacagaaatgtgggtgaagcggatgaaactccgttgtccgacatctttggcacataccggcatttccaccctgatgaccgtgccttgttgattcggtttttggacgacgcacgaaagggacttactaccaaacttagcaaagagatgcgtgttcttagggaggatggcacatacacatggacgcatgtcaatctgttagtaaagaaatatgccccgcaggaccggattatcgaaattatcagcatcaattatgatatcacagaactgaaaaggacagaagaaatgcttgtcaaggcacgtgataaagctgaagcgtccgatcggttaaagtctgctttcctggctaatatgagtcatgaaatccgtactcctttaaatgctattgtcggcttttcaagcctgttgactagtacggaaaatgcagcggaaaaggaactatataattctctgattggacataacaacaaactattattaaatctgattaatgatgtaattgatctttctaaaatagaatccggttatctggaattgcgtccggactgggttaaccttaccgagcttcttgacgagagtgtagcggagtatgctcatcaagtaccatccggcgttgaacttctgactaactatccggcacatgattctctggtagaactggacaaattgcgtatcaaacagatcttgagtaatttcctttcgaatgccttaaagaacactaccaccggacatgtggaagtcttctatgaggtagaccaccaatctgtcagaatcggtgttaaagataccggtcggggcatcccgcagaatatgcttgaaaagatattcgaaaggtttgagaaattggattcctttgctcaaggggccggtctgggcttacctatctgcaaactgatcgtcgagaagatgaacgggcggatattagtcgattcccaactggggataggtactacttttataatcgaattaccgtgtcgctctatgcttgtagaataagtatatgtgaagaatattaaaataaaaatcccttgataacgactgattatcaagggattaattttatgtttcgtgatccgcctggggctcgaacccaggaccccaacattaaaagtgttgtgctctacctgctgagctagcgaatcaatccttcagtgctttctttcgaatgcgggtgcaaaggtagaacatttttttataactccaaaagaattcaaacatttttcttatctttgtgccattatcaacaatatataatcatacattatggctgctgacgataaaaaaattatcttctcaatggtaggagtgagcaaagcattcactcctaataagaatgtgctgaaagacatttacctgtcgtttttctatggagcgaaaatcggtattatcggtttgaacggttctggtaaatcaacgttattgaagatcatcgccggtttggagaaatcctttcagggagaagtcgtgttttctccgggatattccgtggggtatttggcacaggaaccttatttagacaacacaaagacagtaaaagaagtagtgatggaaggtgtgcaacccattgttgacgcactgacagaatacgaagaaatcaatcagaaattcggtttgccggagtattatgaggatcaggataagatggatgctctttttgctcgccagggtgaattgcaagatatcattgatgcaactgatgcatggaatctggatagcaagttggagcgtgcgatggatgctctccgttgtccgcctgaagatcagccggtagaaaatctctccggaggtgaacgtcgccgggtagctctttgccgtttgttgctgcagaaaccggatgtgcttttgctggacgaacctaccaaccacttggatgcagagtctatcgactggttggaacaacatctacaacaatatgaaggtacggttattgctgtgacgcacgaccgttacttcctcgatcacgttgccggatggattcttgaactggatcgtggtgaaggtatcccctggaaaggtaactactcttcctggttggaacagaagaccaaacgtatggaaatggaagaaaagaccgccagcaaacgtcgtaaaacactggaacgtgagttggaatgggtacgcatggctccgaaagcccgtcaggcgaaaggtaaggcacgtcttaactcttatgacaaattgctgaatgaggacgtgaaggagaaagaagagaaacttgaaatctttattccgaatggtccccgtctgggtaataaggtcattgaagccaaacatgtggctaaagcatacggtgataaattgttgtttgacgatttgaactttatgcttcctcctaatggtattgtcggtgtgattggtcctaatggtgcgggaaagacgacattgttccgcctgattatgggattggaaacagtggataaaggagaatttgaagtaggagagactgtaaaggtggcgtatgtagaccagcaacacagagatattgatccgaataagagcgtatatcaggtaatttccggtggtaatgagttgatccgcatgggtggacgtgacgtgaatgcgcgtgcatacctttcccgtttcaatttctccggaggcgatcaggaaaaactctgcggtgtattgtccggtggtgaaagaaaccgtttacacttggcgatggctttgaaagaagaaggtaatgtactgttgctcgatgagcctaccaatgatatcgacgtaaacactctgcgtgctttggaagaaggtttggaagatttcgccggctgtgcagtagttatctcgcacgaccgttggttcctcgaccgtatctgtacacatatccttgcttttgaaggagactccaatgtattctacttcgaaggttcatattcagaatatgaagaaaacaaaatgaaacgtttgggaaatgaagaaccaaaacgcgttcgttatagaaagttaatgactgactagtataaagtaatagattgaagcatttataatgctttctgtttcaaaataaaaggctctgcaaatattgtagagcctttatcgttttataacaagggaaaacgtttatctctcttaaaaaattgtagtataatcgtaatgtagttctaaatattattaattatatttgtgcacagtttttaaaagcaaacaatttatattaactaatcaactacatttatgttaaagagaatgcgatcttttttagtagcggcgatgctcatggtcattgctaccgttagtgcgcaggttaccacttctagtatgagtggtaaggttacagcacaagatgaacctatcattggagcgactgtggttgcaatccacgagccgtcaggtacacgttatggtacagtgactaatatcagtggtcaatttaatttgcaaggtatgcgtaccggtggtccttacaaagttgaagtttcttatgttggttatcagactgctatttataaaggtgtaaatttatcgttaggagaagtatacactttaaatgtagttttaaaggaaagttctgaattattggatgaagttatagtaacagcacagaaaacagtagagaagatggggactgtaacgaatgtgagtgagcgtcagttaacgacattgcctactattaatcgtagtattactgactttactaaactttctccttatgcgggtggcagtaattcttttgccggacgtgatggacgttataatacaataactgtggatggtgcagctttgaacaataattttggtttgagtactaataatttgccgggtggagatgcgcagcctatttcacttgatgcaattgatgaaattagcgttaatgtttctccttatagtgttacgtattccaattttacgggagcttctattaatgctgtaaccaagagtggtacaaacgaattaaagggaacagtttatacatatcagaaaccaaagaattttataggaaaatctattaacgatgttgacgttcctaatgtggaaagttataaatccagtttgtatggctttacattaggagctccgataataaaaaataaactattcttttttgtaaatggagaattagaaaatagtactagccctggtattttgtggactcctagtcaagaagaaggtggaagtggggataatcaaaatcatatttctagaacttggataaaggatttgaagacaataagtgattttgtaaaggataaatatggatatgatccgggaagttatgataaatttgatgatttcgagagtaaaaattggaagcttatggctcgtttggattggaatattaataaaagtcataaactgtcattacgttttaacacagtgaaatcagaaaatgatgctagtattagttcaacttcttcggtaatcactaaagctaattcaaaccgttatggggttgatgcatttgcatttggaaattccaactatggttttagaaatattgtaacgtctctttccggtgagttgaatagcaatttttcttcttcagtacaaaacaaattattagtgacttatacccatatccgagattctcgtacaactaagggagatgcgtttccaatggttgatatttacaaggacggtaagcagtatatgacattgggtacagaattgtttactccttttaatgatgtcgagaataatgtatttagtgttactgacaatgtaactattaataaaggaaaccatttgataactgccggtgcaacatttgaaagacagtatttcatgaattcatatttacgtgctccttatggatattatcgttatgcttcaatggacgattttatgacgggagaaaaaccgatgctgtatggcattacttatggatataatggaaaagacgctccgggagctgaactgacatttggtatgttgggagcttatgcacaagatgaatattctattacacctaatttaaaattgacatatggattacgctttgatttaccgttatattttgatgatttgttagggaatgcggctatcaaagaacagtcatttaatggaacgaatgttgacgtatccgaatggccgaaaagtaaattgttaatatctcctcgtttaggatttaattgggatataaaaggtgaccgttctattgttttgactggaggtacaggcttgtttacagggttattaccatttgtatggttcactaaccaaccgacaaatgcaggtcagatgcaaaatatggtcgaatttgagacttcggaattaccggcaaactttgcttttaatccaaattataaagaaactcttacccaaaatccggatatgtttccatcaactccgggaaatgaggtccccggtgctatagcttatgtggatccgaattttaaaatgcctcaagtttggcgtagtaatgtaaatgcagagtttcagttaccttatggatttatgctttctgttggtgctatgtatacacgtgatatatataatgttgttcagaagaatatgaacgaaaaggccccttctggaacctataatgaacaaccgggacgtgtatattggactaagaataattactatgacaatcctaagacgaaaaccgttatacagttgactaatggggatgaaaaaggttatcaatattcttttaatgcagtattaacgaagaaatttgattttggctttacaggttcatttgggtacacttatacaatggctaaagatatgacggcaaatccaggttcatcggcggcttcagtatggcagaataatgttgcagttaattcattgaatgatccgggtgtctcttattctttattttctaccccgcatcgtttgatagctaatgcttcttatgaagttgcttatgcgaatatgaaaacgactgtttctttgttctatacaggttaccaacaaggacgtttttcttatacctattctaatgatatgaacggtgacggaaactattccgatttgatgtatgtgcctgcttctaaagaagaaatgacatttgtggatattaaagataaacaaaataatgtgacttattcggcggtagaccaacaagaagatttttggaactatgtaaataatgactcttatttgaatgatcacaaggggcagtatgtagaacgtgcttcttctttagaaccgtggattcaccgttttgacatgaagatagcacaggatttttatgctaagattggtagccgtaagtacggtattcaagtaagtcttgatatgttgaatattggtaacttattaaattcgaagtggggggcttatcgctcttgcggtttgcagagttatgataatgtaaggttgttaaaaacagcaagtaaggtaggagaacctcttacttatcagatgaatgcatcttctcgcgaggtgttccagaaaaattctaaatgggattatactgcttctacaggtagtgcatggcagatgcagttaggcgttaagtttacattctagaatatttatataaaaagatgcttcgttcaataaacggagcatcttttttatttcatcctcatcaccaccggattatgatcgctataattaagatccggcgagaagtaatccgtgctattcagttccggtgaatggagaatatagtcgattctcaacagatgcttgaagtacttgaaagtatacatatacccatgcccgctcctctgaaaaccatcctgcaacttatcaccttttatagtatgataaacatacgaagacggcagagagttaaagtcaccgcagactagagtaggatagggggaggcggctatcagttgcttgagaagatcagcttgtacggcccgtttccggaaattctcatgtaagccgtcgataagtcccagggcagcatgttccactctttgggaatcatccgtacgaagtcccttttccagtttgcgcttgttctggcttacttccgttgtttggagatgattgttgaacaggcggatggtgcgaccattgatttcaatatcacatgcaagactgcaatttttcgaatcaggatagatgataagatgctcctccttgataggataacggctgaaaacagccagttgcaacagattcttcccttcgggcgaagaaggaatataatgatacggccaattagaaagagctgcgtatatactatcgatgccaaactcatcgttaatgccaaattcttgaaaacagagaatatctgcttgcagatttctcatgtaagaagcaatctccttgcatgagtagccggtatgctcgtggttaaaggcatcgacgttgtaagtagcaaccgtcaacactcccggagtatatacattcattttaaccatcggtgacgaagccggactgaaaaaaggcgattgtaatacacagcttatatacccccaattgctgaatatagcaatcagagggatgaaaacccagcaccgccaacgaatcgtccagtagatagcagaagcaagattagccaataaaagtatcggcagtatcaaaccgatgaaaggcataaatttgaaactatccggtgcggcattgcctacgaaagcacccgcaatggtaactcctgccaaaatactggtcagcacgatggatatgtaataaaacagtctgtaaaaggctttcatttaatctaaattatttgctggttgtatcatgagggattaagctctctacgaaggaagcaaccatttatgaatcattgctttcaatttatcatccgctattggtttagctataaaatcattgcaccccgcttcttcagccgctttcctgtcctgttcgtatgcaaaggcactttgagcaataataggaacagtggcagacagttcacggatgatttttgtagcttccagtccgtccagattcggcatcttgatatccatcaagataagatccggtttcacctcatcgaacatcgtgacagcttccattccgtcatgcgcacgtataagctgatggtctttacctagaatagcctccaataagtcgaagttactgtccgtatcttcggcaaccaaaatacaggcgtgccgtgtatttgcagaactgtcaacactcgaatctgcagttttcccggcagatgctattccagcaatgttcccttcaccattctctttctttgaagaatccacatttgcaggatttgcaatcgtgtatggtaaagtaaatgtaaacgtcgttcccttaccaaattcggagctgacggaaatcttgcccccgagacgttcaacgatagacttacagatagataatcccaacccagtgccctgtgcatgattgttcagctttgcgaaacgctcgaacacacgccccactttctccggttcaattcctgttccggtatccgttacgtggaatacaatctgattgtccgccagtttgtaaccataactgatgcttccttccttcgtaaacttgacagcatttccaatcagatttgaaatcacctggaatacccggttcttgtccgtttcaatcatcagactttcgtccgaggattcatagacaaggcttactccctgcggagtacggaatatatgagcatcgtgcactttccggcagagattatggagactagccggtccgaaggaaaactcgatggttcccgattcaatcttcgagaggtcgagaatctcgttgataagttgcaggagacgttcgttgttcgcgtttacgatgttataatacgtcttccgttcttccgcatcgtcgctttcggcaatgagatgcgagaaacctacgatagcattcagcggcgtacgtatttcatgactcatattggcgaggaaggccgacttcaggctatcagacatttccgctttctctttcgacgattgaagttcccgttttatcatttccagctccgtgatgtcccattcgatgctgacgatgataggcgaagacaattcgtcaccgtccacccggattttccgtttgtcgaggataatcatgtttccgtttctgtcctttccttcagcagtccagtgcagaccttttccggtggtggccacctggatatcttcttgtctcttcttttcggctacgataggcgggtagaaatcgaagtcattcttgccgacagggtcgttcttataaagatcgcggttgtaggcctcccgattccggtaaatgtatcggaagtcgttgttgatttccttcactacaatcccggcagggagattgttgatggttgtatccatgatttggttgagccgtttgatttgggcttcgtaccgaatcctctcggaaatatcatgggcaaacgaccagtaactttcttctccggaatcattggtcacgttgtacatcgtgccttcataagccaatatacctttattgattttagatgggtgatgagccacaaagttactgctgccaccgtgtatgacatctttgcaacgttcgttccaagcctcttgtgtaggcatatctgcggcgacattgtaaatctttaattgactgatgtcttcgttttctgaaataccatgattgtacaggaaacgacggttggcaaagataatcgtgccatcgggcttggcggcaaagatactttctttggcgttgttgatggcatgagtcagtgtattgatgtcatttctacgatgctgtatgtccgtgatgttctggatatagccttcgatattgaaactaccgtcggagcgttgttcacgcagataagtctggatacgcatatagaagatttctccgttcaggcggacacggtagctgatgctttccatgttgagttctttttcgttcacccgacaccattccataaaactctgacggtcttcttctacaatcagttccacatatttctcaatggcaaggttttgcacattttcctcgcacaaaacaccggtatatccaagataatgaaaaatattctgtttcgtattgtacgtccattgtcctatctgggctaccttttggatagcccgcagggtgagatttgcctgttccaactgtctttttacgttgcttctttgcgtgatgtcgcgatattggcaaagcaccataccgtcataagggaacatgaggcatttgaagtaaaaagtttcgcctttcagcaccaacttgaagttcttgctgatgcttctttgttcttcgagtacaatctggaagatgggcatcaccctctctctcgtatattctggtaaaagctcaaatatattttttcctaaaagtatatcctcttgcagaaaccatagatcacaatgaggctcaatgtctacgcagactccgtgcctgtcaaccaatagcattgtatctgccgtcagtttcaatattctttgtgcgttattcgcatcatgtaatattctgttcatgtctgttttttattagatgatagagactaatgtcttatagtaaggataacaaaagataatagcatttgttttacttttcagcgcgtttcgccttttcccaggctccgcttccttttttctttttcagataacggatgcctttcagcacattgacattcataaataagaaatagtaggggataaaaagcaacttgttttttatctgtttggtggatagataatatccccaatatcccaatccgtaaaaaagaacctgcatggcaagcagcactccgtagaatatcgcggaaccgcccaacagcagaattgcaatattcagcgggaagagagcaaacaacaggaacggagtaatagaccatcgcaatacccggtgagatgtatattgaaagctaagtatcccgtagcggaaaggattcagtaacggacgaagtcgccagatggactgcaatcctccggcagcgatgcgcactttccgcttttcttcttcgcgcatatctgccgaaccgctttcgatggcgtaagcattggtgcaataagcaatggtataacctttcatggtgatccggagcgaaagaataaaatcatcgagcaacgtatccggttccattgcttcgaatagttcacgacgcacggcaaatagttcgcctgctgctcctacagcagagtagaggcgggcgtcaagtgctttcagtgttgattcgtatttccagtaaataccttccccaccggcagcggctccgtctttggtctgtacggcgatccgtttttcgccggccacgcagcccactttcgggtcttggaaagcaagtacgatttcccgtattgcctcccggtttaccatggtgttggcatccgtaaagacgacgagcggagtgtccaccagcgtcattccacgtgtcattgcggctgtcttaccctgtcgtaggggttggaagtgtacggtcgcttttccctgccaacgggtttgcagtcgttcgtttgtactgtcgtcgcttccgtctgtcacccatacgatatgcagtttgtccgcagggtagtccagttcaagactgttctccatcttttcgtctacaacatcttcttcgttgaatgctgtaatgaagagagtcacttccggcaaaccagcgtccgatgccggcaacgaacgcttcacaggtttcacgaaaagttctttcaacttgacgagaacgtaaagcacaattccgtagcccagataggtgtagaacacaatgaatagggcaagccagaaaataatttcaaggcagagggtaatggtttcgttcatggttaatatatatttattactttttctgtgtctgatttttataaaccgttcacttgattcgcttttttaattcctcctttttatccgagtcttttagcatatttacaaaatagagggcatccgctttaacagaagcatctgctgtatttgcttcataccgtttcacgaagttttcggcatgttctgtcagatacttcctgcaatcgatattgagcataatcccattttcatagttactataagacagtcctgtaacactgcttccggcctcaagggaggtaatatcttctttctttataccagataggttgactgtgagagaaggataataaaagtcttcctcactgggcagatgaacggtcagtttcagtttatgttcatctatctttgtcactgctgctgtgccgtgtgtacgatagaaattgtattcataatattcttcctggttgggtatccacacgttgtccgctcccttttttccatagttattgttaatccagagcaacagatccgcccaagaagcatctgtgccatgaacaccgacattgatagccattcgttcttccggtgataattgtagctgtttgtcgatttcttttttcagatcctcaatggaatagaaccctctgtttagtaccaccttttttaaatcgttttccgtttttgccggacatagtgtttcaccgtcgttggaagtcatggtctgtatagaagaatggacttgtccagcggtgatatattcagcaattccgcttggtttagccagcattttacatcctctgccagacaatttctctttgatgatattcaaggcaatgtcgtaatgtttaagtaggttatcgacagtgatttcttcattatctatattcacatcatgtatggagatgcctgttccatagttcagcatctctttgacatctccccatgtcagccctgatttcatgaagaagcgataatattcttgcgtctgtcctttgtagatttgtgttttggcgtccatccattcccattctggtgagagggtggtggtaaatgagaacctgacttcgtttccggctccgtccgtacttcccaatgtttcaccaagataataaatatcgggtggaaggtcatcatattgcaggtggccgagttgataataataaccgctagtcaaaggtttgccattgatggcagcccacgtccatgagaaggcggcttgtttgcagtcgtcttgggtaagcattaggagccacgacttattgtattttagtgcgggaataaccgtttttatggtattttcttcgggcaaagtgttgcgggtgttgattgtaatttccgcagtatagttttggctttcatccccgaaagggtagaagaagtctgtgtctacgatgatgtctttcctttggggagaattgttgtttcctgaattatcttctttttcatcgtctttgtctccttgatataaattgatttttttgatacaggatacgttaataaggcagattgctaatagcatgatgactgtttttgtttttcctaaaaacaataagctgctgaagcgtgtcatttccaacagtctgattattcccacgcagagaagaatcaatagaatggagatagctggcgttataataaagttgaacatgaagaacccggtgtccaacaggttgaaccgactcaatacgttgccttcaatcaagatatgtatggtatagatgccaagtgtatatgtgcccactttttcgattgcacggaaatgcggacgatagatacgttgcagtagcaagaagataaacaggcttcctgcgaaaccgatcaaatagcgataacagatgatcggcaatttttcccatggcggataacaaacgaactttcctcccagataatcgtacatactcattccggtgatgtagatataatcttctttctgatagaaagggaggagtacagcgaaaacgaggagtgaagcgaccagtagttttccccggtgtttcatgattacatcgatatatttgtgcataaaataccccatccaaaagaatggatacataaacttgtcgaggtgcagacgtccgttgtccggcaatgcgaggaaacacagaagcgagatgacgaaagcggctgtatcttttttgaatattttcatgctgacgatggcaagtgtgaaacagatgaaaacggagcgtaagaaccagaaacgggtgaatgtctctataaaaagagatttcaacgttccggttggagacgggatcattccttcatagagcatatatccgatgttgattgcgaccaacactaatgaccagccgaaacaaggaattattaactgtttgaatcttcgggttacattcggtatgagtggctttccgatggatttactgaaaaagaaaccgctgaccaacatgaatatgggcatgtggaaagaacagataaattcatgtaccggattggtccagaagtcgttgccgtctcccatattttggatagaatgtccccagactacaataaaaatgcagatacctttgatgaagtcaatatattctattcgttttcccatacttgtttatttgttctttatcagattgctgtcttcgtctttatattctttctttttagtaaatattccccccagtcctttcagacctttggcaacgcgcactttaaagctgttgaacaggcttccgtcagctcccaccgttccatatcctgttacggcgcgtgctttgcggttgcggataaaggctattttgccgaattgcttgagttgcagagcaagataaccgtcttcacctcggatgatatcggtgcgtatgccggttttccgtgcatactctgtgcgataggcaagaaccaatccacgcacactaagttcgggacgtttgaatgattgcatccacaagtgcaaatcgcgggcagcttcgtagattttcagtccccatcgcgagtgtttctcatccggaatgtagctccataaagagcagacggccacaatgcccgggcgttcgagggtgtttaccatcatttctacgtatttcggagggtacatagtgtcggagtcaatattgatatgatatttacctcgggcatggttcagtccgcaaaggcgggcgaatccgcaactatgttgggtttctgtataataaggtacaccgcattgccggaatatctccgccgtgctgtctttcgattcgttgtctactccgataatttctacaggatatttgcattccatctcgctcaaagaccacaggcaggcaagcagatgtttctcttcgttgtagccgataattgaaacggtgacaagcggttcatcactttgcagctttgcaatattctgccgcacttcttcaatggcagatgcgggtgcttctgcaaacggtttttcataaacttgtaaatacttactataccaaatcatcttttatcaaggattgagtgtttcaaataattttttccattctcgggcaatatgttctattttaaaacgctctacgtcggtgcgggcttgtattcccatcttccggcggacatcttcatgttctatcaggtagcagattttgtctgccagtccttctatatctccattttccacaagcagaccgtctttgccatcggtgatgatgtctttcgggccgcagggacacgtgaacgatacgggtggtactccacacgccattgcttcgatgatcaccatgccgaatccttcgaaacgtgaggacagaacaaagatggaactttcacaatatttctcaacaatattctgcacgttatgttccaggatacagttggaggtgattccgagttcgtcaatctgccgctggagttgctctctcatgccatcgccgtagattcgtaatacccagtccggatgtttcttgctgacgatgctccatgcggggataagtcggtcaaatcctttctgcggcacatatctgcctactgcgattacttgtttccgtaatccgccggactgacgttcggggaagaaaggaagcggattatagattacttttacattatcgagttccgtccattcagcggcatcttcgtggctaagcacaatgaaattccgcagttgtttcaattggcggatgagttggtgccgccagtatttcttacctaattttttgaggaatcccggtagacggttgttgttgaaatcccgatagttggatttgttaaaatgtatctctcccaacttgacactgccgtctttcatttggttgatgaagttgatgtcgcggcggagaagggagattgtgatgtccggacggattttacatagacattcgttcagccttttcttgaatagccgttgcttggtgctgtattcaagaatccgtgcgaataacgggcgtccgtataatgcgtcgtagttgatgtcgagttggtgtatggtgattgacgggtgcagtttataatatggctccttgtcttttccgtcggtaaggatgatatgtatctcgtagccgaagtgctccgtaaaatagttcgcctttagtgcgagaacccgctccataccgctggggtaatagagagaggggatacagtaggctatttttatctttttatccatcagatattgtttgttttttcagatatatctatgtgaaatcagatttcggtttcatgaatgacttttctcatttgtgctgtccatgacagtgctctgaccgtttcgcgtatctccggtggagacatttgttgagagcgttggaagtttatcagtccgcaaatgtcgatgggcgattcatccggtggcactttccatacataaggcatccggtcgaaatcttcgtccgtttccgagtaggtgaacgaaagccctcgtgcggcatattcacggttttttagtgttttgatgtaggtgattccgctccggtgacgtcccaggctgcctatggcaaaatctgctttttcaaattgttcgtccagtttgtcactgtgtagggggccgtgcaggatgacgtacggttccagatggttgtcgcggatggcaggcagtatttcttcctgttcgcgtatgccggacaggggacctacgatgtggaaataaactttgtattccggatttgtacggtagtattcggctagtccgtgtatcaaccggtcgaatccgtgccagtagtgcacttcggccactccaatcagatgaagttcgcgtgaggtgtcgttcatcgttcgtttgatagggattgcttcgaagtctattccgttggagatccgtatcgtttttcctccaaaaatatgttcggcgttggagaaggtgacgataccgtccagctctttggctagccggtggcggaaacagcggtcgatggcgagattgaatttcatcgaccatgccacatattcctgatcgtaaggataggtaggtatttccattaccactttcgctcccatccgtttcaattttctgactagttgcagggtgaacgggcttgcgttgtgaaaggaacgcatatatataaattctattttctcgcggcgtacatattcagtgatgggggagtagtagacacgtttccatatctttgctgtgaatccggttccgaaatcggcaatgacttcgtcgtctattatccatcggcgctcaccgttgggagtggtttgatagtaacaggtacgcacgtccaatccgcactctttgagggcttttacctgataatgtatttttttacttattccattcgctttatcaaagccgtggaacataagaaataaggctttcattctttgttgttgtctcaaatctataattgcttattttgttttttttatatacttgccagctatttttttcacttttcctatgatgtcatattcatgtgtagcctgtatatatcctccaaagataataaaactaatgatacttttggtaataattgtcacgaaaatgttcataccttccgttgtatactgcacaggcaggaggcacgctgtcattaacccgctgactgccagcggggaaaggagctgacggacgaacgtccatacctttctccggaacgttacatgatacatctgccagtagcattgcacgaagttgacggtaaatgtcaatacgatacaggttgccactgcggtgagcgtgccgaaatagaagataccaatcagcattcccgccacgttgagggtggatgagaatacgccgcagatgaacaggctccgggtgtctcccgcagcctgaaaaatggagccggaagaggagagtataatttgcacgcctaccgagagggagagtatgcggaatacgggtacggagggcaaccattggttgccgaatataatcagtgtcacttcttgtgctgtaaagaaaagcaatacgctcatgggtaaccctatgaaagagagtatgcgaacaatgcgttcataggaggacgccagttttgctttgtcatcttggaaatcgctgaagatggggtgcatcaccggagtgatgacttgtgtgatgttttgcaagggaagcatcatgagccggtaagatttttcataatatcccaagtcggacatgctcatgtgttttcctatcagcagtttgtccagattacggctgaaatagttgatgacgttgaacaggaattgataggccgaatatgaaaagatcttgcggagtgctgccaatccccatgtgaagcgcaatcgttgcggatagcgctggtaggaaatgacaaatatcagtatgctggagatgatcggggtgataatcagtgcgtagagtcctgctccgcagagggctgccgtaaccgctcccgcacctccggttatctggatggtgaaactgcggacagcgatgtatttgaattctttgttgcgatagaacatggctccgggcacgatggtggcggaggcaaagaagaggttgacggacagaagttggcacaggatgcgtaagatctggctgtcgtagtagtcggcaatcagccatgaggcggcgaagaaaagcaggctgatagcaattcctgtccatacggtgaatgaaaaaatatccgacagttcttcttttgtcagcgctttgtgctgtatgatggccggggagattcccatatcggtgaacaggttgaaaaatgcgatgattacggtggcgatagctacgattccgaagtcgtccggggaaagcaggcgtgccaatattccggctactacgagggagatgatgatgccgctgtatttggctagtgccgtgtagaatacgcccgaaaatagttgacgtttgatgttgttagccattgattacgtctttataggtttgtgcatattcctttcctattttccggatgttcatattttccaatgcgtatgcatagtttttttctccttgtccccatgcggacagttgacgtgctttttcaagtgcctccagaatgtcggacctgtcgtccggatggaacgtcggatttccggttgcggatagtatttctccgatgtttcctgttgtcgggcctactactactttgtggaagaggaaacctagggggacatttccggagttcagaatatctttcctttgtatgaatattacgtctgaagcagcgatgtaatagggcaggtcgcagttgtctatcaattcgtcattggctccggcatgaaatttcagaaggcggttgagcaatggcatggcgagatagtaacccaagcgcgaagcccagcgcttgaaaagattccatccgtattcgttgcgtctggagaaagggtagaggcggggagccaacagtagcttgttcttttcattccatttgcagaaagcactggctaccatgcggatttcttcgcggttgcggaattttccgaaggcggtgacgatgaatgcttcttgtggcaggttcagatattgacgtgcgcgctctatgctgatatcctctttgtaggtgtattggtagatgtggtgcgggatgacaacattccggctgccgggatgtttttcaatgaattccgtcaggctgtaatgtcccatgtgtaccacgatatcgctttccgactcgatgatgtcgtaggctcggctgatgacttcattggcgtagtgggggcggatattatgtcgtgtgtatacgaaatgggctccccgtgagcggaagaaagcgatgcgttctttcagacggcggatgacgtcgtggtcttcgcatatccagcccactacctcctccggccattggaaatggatgatgtcataagtggtgtccgattcccaaaaatctttcttggagcatcttacgtcgattccagccattctgatagcatcgcataagataggaacaaatagattgtcggtttctccgttttctctgaaaacgatcagtgcttttattgatgggctgtctgtttcgctatcactcattttttaagttttaaagacttttattacattgcaaatgtaataaaacttatgataagtttctccttttctgtgttttaattgcagtttaagttgctatttgaggaaatctgaaacaggtctaatgtttttataagccgtttttcttcttgggtataaggaatgtggttgctttcgatatattgcttgaggaagagacaagcatgtatgaaaatgtctgctttcatatagctggtgaaatttatgtaacggtagtaggaagcttcactgatgtcgatatgcacgcagaggtctactgtggctagccgtgacgttttcaagagctcttttatcagctctattctgtttcggtaatgctcgtctactattttattttcttctatttcttccaacgtttggttgcgttttgtatccatattgtttggggttattaataattttggcaaaggtctgataaaaaagatataattcctctctcatttttgcgatagctggaataaaatacattttgcacctttgcggcccggaagtattaaatgtggaataataaatgataaatgaaaatgaagaaagatcagtatttcaatttagaggtaaatttgttgaatgacgacaatattgcctgtatgatgtcggagatgaatgctgcggaagcactcggaatttacgtgatgttgctgttgcatctgcgcactaaagatgcttatgaggcgtcgtgcaaaccggttttattgaaggccatggcccggcggtatgatgtggatgaagttgcggtggagcgggtgcttcgcgaattcgatctcttcgaactggatgaggaacgacagatgtttcgttcttcctacttggatagggtgatgaaaagcttggaagagaagcggaaaatggacatcgaaaacggtaaaaaaggagggcgtccgaaaaaggtggcaaaaagtgctgaaacgcccgtcagtaaagggagaaaacccactgaaaaccagaagaggagagaagaggaaagtaaagaggaggagagtaaaggaagtgtttctgttgtaaacaataataggagtaatatagaaacaccgtctcttgtgagccgtttggcggatgaaggcaatcatggcccgttacaacccgtgttgccttgggaaaagttggtggaccaactttctactttccagtcatatatggaattggccgggcaacattccggtttgggaaagctttttgtagaccatcaaaaacttattttggaaatcttcaaaaaacatatccgcctttatgacaaaggagcgggactgcttttcccggaggacgtgaaacggtatttttcaaattatatcgcggccggttccgttacttgtcgcacgttgagggaaaccttgctgaaagagcttgagaatacggtcgacaaggatgtaaaccgctttgaaagcgtcgtcgacgggcggcgaacgtatctgggacatcttattccggttgatgcgccgccacgtcccgatgcatcagctgtgtgggatgatgtgaagaaaagatgggcgcattaatccggcagatgactggcttcgtccggcaggttgccgatgttcgtctggtaggtaacggaagttcgtccggcaggtggcagacactcgtccggcaggtaagtcctctgtgtgtgaatgattattttaaactatttttttattagaaaaaaggaaaaaaatatgagaaattttgccaactatgatgtcgacatccacggtaaatcgagtggagtcctcaagacgatttgtaaaaaatgtcttcctacccgcaagaataagcgcgaccgttcgctacgtgtcaacgtcgacacgggccactgtcactgttatcattgtggcgctgatttttatgttcccgatgatgtggaagagcgcaagaatgccgaacgtgtggcagcccgcaagcgtcgtgcggcagccattccgcagcattttcagcgtcctgtgtttgatgcctcgaaaaccacactttccgaagacacggagcgttggctggtggagacgcgttgcatcccgcagtccgtcatagccgccctacgcatcaccgagcaggaagaatttatgccgcaatccggcaaaaaggaacgttgcatctgcttcaactattttgaaggggaacaactgataaacaccaaatttcgcgctctcccgaaacttttcaaaatggtgcagggtgccgaactgattccctacaacatcgactccatcctggggcaaacctcctgcatcatccacgagggggaactggatgctgcttcttccatcgccgccggattcaaaagcgccatctccgtgccggccggagccaattcgaacctctcctggatcgaccgttttatggagacgcacttcgaggatctggaagaaatcatcattgccgttgatgccgattctgccggaatccggttgcgcaatgaactcatcaaccggctgggagctgaacgctgccgggtggtgacttacggtccagagtgtaaagatgccaacgagcatctctgcaaatatggtatcgccagtctccgtatcgccatcgaacaggcagcagaagttccgctcgaaggtatcttcaccgctgccgacttgcatgacgatctgcgggctcttttcgacaacggcttcggtcccggagcggaaacgggatgggaggagatggataagatctgcacgtatgaacgtgggcgaagtgtctacgtcaccggagttcccggtgcaggaaaatccgagtgggtggacgaattggtgttgcgtctctgcctgcggcatcaatggaaaatcgggttctttagcccggaaaatactcctatcgtctatcatctccgcaaactgattgagaaactcaccggacaccgttttcaaaacggctgtggcatgacggagggactccttgcgaactcggaagattttctgactgaaaacgtctctcatatctctctgaaaggtaatgtttctccggatcgtgtactggccaaggctcatgaactcgttgtccgccgcggctgccgcattattgtcttcgacccgctcaaccgtttcgaccacaacccgcaacctggacagacggaaacgcaatatatttccaacctgttgaataaatttacagaatttgccgtgcaacataattgtctgctcgtggttgtagtccatcctcgtaaaatgaaccgtaatcctgtcacgggcattacccctcgtgtggaaatgtacgacatcaacggctctgccgatttctataacaaagcggattacggtatcattgtggaacgtgacaaggaggttggtgtcacacgcgtatacgtggacaaggtgaaattcaagcatcttggtgtcggtggaatggcatcctttgtctacgatcccgtaagcggacgatacctgccttgtgaagaatctcacgacccttctctctccgctgaccagcgtgtccgaaatacaatgttcgacaactcctgctggctacctgaaaaagagctgtttaaaagtattaggtattaagtagcaagtattaagtattatgatgttatccattgttgcgatgcgtttaccatacttgatacctaatacttaatacttcaattagggttcttggagtacttcgacgatgagtcttacttgtgcgggagtgtagtatctgctacgtggattcatgccggtggccaggagtcgttcttttagtccgggtgcagcttcaatccattcgttgaatcggtctactgcgctttgttgcaggatattggggaggtacaacagggcgagctcgcctttcccataggtgcggtattggaatgttttttcttcttcttgttcggggagaatcttgttttttgttttcatttatagttgtgcctttagattgttatatttgaagtaaagttactcatttttagtggaataggcaaattttgagagcggatgttcgggcgtattcataaaagaattgatactaatagaataccgattcttgaaatttatcgtatctttgtttacgtttcacgttaaaagcatagaaaaaggatggaaggaatattcaggcgttatccgatagggatacagagtttcgagagactacgcaatgataattgtgtgtatattgataagacagagttgatttatcgtttggtaaatacacatacgacttattttcttagccgtccccgacgctttggaaagagtctgttagtttccactcttgaagcctatttctctggtaaaaaagacctgttcaaggggctgatgatggaacagttggagaaagactggacggtttatcccgtgttgcatattgatttcagtatcagtaagtatatgaatgcggggatgctgcgctccgctatcaacaatcgcttggtggaatgggaacgaatttacggatgtgacacgagcgaagacactttcagtctccgtctgaaaggtattatcaaacgtgcttacgagcagagcgggcgtcaggttgtgttacttgtagacgaatatgattctcctatgttggatagcaacaacaatgaggagttgcaagctgaaatacgtggcatcatgcgcgactttttcagtccgttgaaagcgcagggagaatatcttcgttttctttttctgaccggtatcagtaaatttagtcagatgagcatctttagtgaattgaacaatcttcagaacataagtatgcaagatgcttatagtgccatttgcggtataacggaaaatgaattgcgtacacagttggaagaagatataagaaggatggccgaagcgaacggtgaaacgtatgatgaagcgtgtatacatttgaaacaacagtatgatgggtatcatttcagtaagaaatgtgaggatgtgtacaatccgtttagtttgtttaatgcatttgcgcagaaaagttatgagaatttctggttctctaccggtactcccactttcctgatagacatcttgcagcaaagcaatttcgatattcgtcaactggatggcgtttcggctactgccgagcagtttgatgcacctaccaatgtcattacagacccgcttccggtactttaccaaagcggttatctcactatcaaagagtatgaccgggattttcagatctatacgttggcttatcctaacaaagaagttcggaaaggctttatcgaatcattaatgccggcttatgtgcatttgcctgctcgcgagaatacattttatgtagtatcgtttatcaaagacttacgggtcggcaatctggatcaatgtatggagcggatcaaatcatttttcgcctctatccccaatgatatgaataataaggaggagaaacactatcagaccatcttctacctcctgttccggttgatggggcaatatgtggatgcagaagtgaagagcgctgttggcagggctgatgttgtgataaagatgcaggaggctatctatgtattcgaattcaaagtagacggtactcctgaagaagcgttggcacagatcaatagtaagcagtatgcgattccttatcaggcagatcatcggaaagttatcaaagtgggagttaatttcgacagtagtatgcgaactattggagaatggatcattgaaaactagggaatgatcttacatattcctacatatttccacatattccggtataattcggtataatccgttttaatccggcataatccggtgtagtccggcgcaatccggcaagtcgtcaacgtgttgtcgtatctttgtttcatcaacagaaagggagaatgtacttcttttcgtagaaacaatttttaaatatggcaacagttacagttgtgcgctataagcgcagaaaacggctcggtgatgataaatcaccgatgatgtatcttctcaagcccaaggctggggagtcgaaaatctattcaattgattcactggcacaggaaatcgagtctatcgggtcgctttcggtggaagacgtgtcgcatgtgatgaaatcctttgtccgtgcgatgaaaaaagtgcttgtggcagggaataaggtgaaagtggatggactgggtattttttataccacgctgacctgtccgggtgtggaacaggaaaaggattgtacggtgaaaaatatcactcgcatcaatctccgtttcaaagtcgacaactcattgcgtcttgccaatgacagcacggcaactactcgtggcggggataataacatgatgttcgaattgtatacggagaagaagtccgttgccggaggaaacggtggtgacggctccgatgatgatggtaaaggcgatgggggagaacccggtggtggtagcggtggaggagaagctccggatccggcagcataaaccgctttgattgactctgttcttaatttattaatttatcatctcaatctattaaaatgttagataaaattatcgaaatcatcatgacgattctgcctttcctgggcagtagccgcaagaagcgccagatgatggcgcaagaagtgaaagagttcagtgaactagtgaaagaccagtatacttttctgatgcagcagttggagaaagtgttgaaggattatttcgaccttagttcgaaagtgaaagagatgcacgcggagattttctcgttgagaggacagctgacgcaagctgcggctctgcagtgtagtagcaaggaatgtgtgcaacgagtacagatggtcactgaaacggagggatgaatttatgcgaaccatcaacttgattgtgatccactgttccgccacaagggcggacagggattttacggaagatgatttggaagtgtgccaccgtcggcgtggtttcaacgggacggggtatcatttttatatccgtaaaaatggagatataaagaccacccgtgagattgaacgaatcggtgcgcacgcaaaaggacacaaccagaacagtattggcatttgttatgagggcggacttgactgccacggtcatcccgccgatacccgtaccgaatggcaagttcattcaatgcacgtactgattcttacgctcttacgcgattatcccggctgccgggtgtgcggacatcgggatttgagccccgatctgaatggaaacggagagattgaacccgaagagtggattaaagcgtgtccgtgcttcgaagtgaaaaaagaatggaactgatcactgaagaatgtcataatagacttctgtgacttgctgtgatacgcgtcggctgtcgaaacgttcctgaatgacagccatagctgcgtttccataactttctatccattccggataatggagatatgtcaaataacattccgccaactcctccggttgaccgaaatctgcaatcaatccgctttcctgatgtgtgattacttctctggtaccgtctgtaggggtcactaccaatgcttttttcatagccatcgcttcgagcaacgcaatggaaagcccttcccataaacttggtagacagaaaacattgatagcgtgcaatacatccggcacatcattacgaaatggtgaggtccggatgtattcttctattccgttttgccggattgcttccttggtctcttcttccatatcgccttctcctaccagcagtgctttgattctggcatctttctggtgagcgatagcaatactttttacgaaatccaacggagctttctggagagtgatcctgctgacgaagcctatcacgaaatcatcttctgtaaatccgaattccttacgcaggtctttgcggtttccatccggattgaatcgtttcaggttgataccattttctatcacgagtgcattcttcagtccgaaagtttcttggccggtaatccagttgctttcggatacacagatgacttttcggcttaatttacagataattttctcactccatgcccggagacttttgattagaaacgactggtcttgatgaaagctccatccatgcacggtgtataccatcggaatatgtagcttccgggcaatgaacgctacattggaggccgcacgacttccgtgggcgtgaatgagttgtatgttttcatcaagtatcaacttcttgatttgttttgtgatacgtatgtcaaaaggatgcgcagtgttaatgacgtaacatctgacacctcttcgggtgagctcgtcaatcatttgtccgcctgtgaacgctagtacgatgggattgacgcgttcgtcaaaccctgctatgaggtcgagcagatgagattctccgccacccacttggccttgtctgattacttccaatacattaatggtcatgttcggtatgtataaattgtttgttgactcctttcagtttaaacagattactcacaatgcctgccagcaatgagggcaattgaaggatgccttgtagcagtcgcttattgagcatacgctttggaattgccgtaaataatgccagaaagagggaaaaggacaatatccaccatttgatactcatgtgcggatggacaattgtgaatatgattgtgaagaaaaatgtgcagaaaatcagtacgatacgtggtaggagtgtccattggaataccttgtcacagtagttgatattaccgcgaagcagttctccgggaaaagaggggagtgcccggctcaacgaatcgaactgggcagcgatccaacgtttgcgctggtttttgatcacttctttcttttgcgttttttcatctttcacgtggacgtgttccagatattcgatatggatgcgctgtttaagtagcagcgattccagttctttgtcttctcctgctgtctctagttggggaacatgctgacggaaccactgtgcttccaatgccatgccggagccaataagggcggaagaaaatccgagagcaatatgcccgctacgaaatattgagttgttgatttcttcgctggcggcatcaagaacggcgacatctgtattcatatttttggcggtgcgatgtgcctgaatagctttttcgcctgcttgaaaggcacgattgatttcagacaaaaaatctgggtctgttgtgttgtcggcatccatgatgacgatcatgtcataaggagtgtcagctgtagctttcatggcgagattcatggcttttgccttggagctgtcagtatagtcggctgtcagcaggcggatcggaagttggcgtaaggcttcattggtgctttcttgcatctggtctgaaatcacgatgatgtcgtagaattctgccggataatcttgctgtaaaaaagattggatagtcggcagaatgactttatcttctttataagctgggaatagtacggcgaatttattgtgtttgggagtattgggatagttacgacgacggtagaatttggatgccaaggcaaacaaaagcaaataacctatattgatagccaatattgtgtatagtataatttctgcgatgtacagtatagttgtcatatttgttcttttttatggggaatacgaataaatgctgatatgcctttcagtgtggcggttagaagttcaggatgaccttttaacagaaagcttattccattttttccggctgccacagtcatttgataggctatagagagaaagcgtctgcttccgtcaaggtttcgccatgcatagagcaaacggttgcgtgtcaggtagtaggtgcggagcgcactcaattgccctgtgctctggctttctttgtgaaaaaccgtgcaacggggttcataccataactcgtagccgacacgtgttatgtgagtgcaccagtcgagctcttcataatatagaaagaatatctccggcatcattccggctttctctatcacttcacgcttcaccatcatagctgctccatgcaaatagggagtagtatgcggggtgtcgaatcttccgtcgtccggacatccgaatccaattccttcattacgaagagtaatagagctaagcggagtatatcctgcgaattgtatgttttggggtggaaaggcaaagcgtattttcggcgatacgcctccgatttccggacggctttccagtcgctctatcaggcaagtgatgttgtctgattcaatataggtgtcattgtttatcaagaaaaaatatttgccttttgctacacggagtccgatattgtttccgcccgaaaaacctttgtttacatcgctgcgaatggtgattaccgtagggtataacgcacgtatcttctctgcttcgttttcgcgtgaagcattgtctaccactatgatttcataacttatggaatgaatcttgtccagaagtgactcgattagcttacaggtgtctttaaaaccgttgtagcaaatggtgatgaatgaaattgtagggctttccatatcttttactgtcctaataaagttgctattgtttttccataacgtttgttgttctttatgtatatgatacctttatatatatagaaaggtatatatatttgaaaaacagtactgataatagcccataatttccagtccaatgcatattttttcatcagaaatgattggataataactaacggataccatgaaaataagtaaatagcgtatgaactgttggaaagatggtcaagaaacttcagattgtattttatgtatagtgaacttagtgagaaactgaacgctattccgataaaagcatatactattcctatgaatggtgtatcccagactatgaaatagattaatgcagagtagattattaaaagtccgcttgctgtgtatatatttgcgagttttgctttgtcgctaatcattgaattatattgggcatatatacatccggtgatgaaaaatatcaaatagctagccactccacctagatttaaaaattcaatatgtttgagagggttgaattcgtataataaaatgagcagaggaaggcagactaaaaaggtatatttaaactttagtttcttgtttgctttgtatagtattattgtgatgatactaacaataaataaagtagggagaaaccagaagaatttgataacgttgtccataggatacaatagcatgtgaatgtatgaatggatggagaaatctatagggcgtagagcgtgtgcacttaatagtactttggggatataagtaatggaactaataatgaaatagggaacaaggagccggatcgctcttttgactatgtatccttgtttgcccaataaacttatatctgatatttcttgctgtttatgcatagttgcataatttaataaatagcctgatatgaacatgaataatggcatgtgaaaactatatatccatttatgaccataataggactctacggctgtaaaagaatgtcctatacataccatgatgatagcaaaagtatttaagactaatatctgttggttctttttcataacttcttgttttctagtaccattcttttttctatatgcggagctgcaaaacagagtgcaaatcctatataaatggggagttggttagggtattgcatgacatcacttacgtaagcggcaatgaagaacccggcattcatacacacccaggctgctactaatccccgcagactcttgtcgcgtattttaaacatcaatatccacgaacaccagacaaaaagaattccatgaatggcaaggtaaagaagcagcccgacaattcctgtctctacccacacgctgaccaaccatgagtcgggagggtagggcatctgttcttttgaattgaaattacccgcttttgacagtccgattccataaccaaacggctttttcgacatcagttcttttattaatatccggttttccacacgcaccatataggatgcatcttcagtgggatggaaagaggaacgcattttacggatatactgattcccatttccggcatttgtataataaaagaaacagaaaatggctattgatgcaataacacctgccagtaatgctttccagtttttagcgatgatagttaccatcaacaaaccgcccatgatgactcccattgctgttcttgttccggatattcccatcccataaagcgcgcagatagcgatgaagaaaaaataaacgcgtttccatttcgatcctgcataaaaagaggagatggcaaatacgactgccgacagcgcagcatgcaccccgtaattagcggcatcggagaaacatgagaaataacgtatgccggaccagatgagatgcgtacgccatcctcccaatgcatacagaaagtgaaggtctttttcgctgaaaccgtggtttttttgccaataaccttttatggtaaatatgagaacaaatatggaccatactattaataataactcaatatcttttttcgtacggatgacaataggaacaataaaagcacatatcaaaggaatcagcgcataaggagtgaggccaatgttccatgcttccattacattattaggattcaagatttcgaagaaataatagactagccagactgtgcacatataggtcattatgttttgtccgggtttccagtttgtttgcttgtcattggccaattgtatcaaacagatggttgtaaacatcaatatgagtgccatagaggctaaaccagtcttggtgtttacaaacattcctgatataatcaccacaaattgagcggcaaataacaagtggaaagttattattctattcgtcatcatcctcctcttctgctgatccttctttggttttctttgttaggttgaaccttattttttctgtgagcgacagttggctaagacgataaccgatattccgcagtatggtgtatggtggaagttgcctggtgaaatcttcaattgctgcccgggaagcatttgtcaggcatatacggaatggaacgtttgttttatccaattgcagcatgagctgttcgcaaagttgcttgtcaatcgttttccacccacggtttgcgggagctaccaagatgtttgcgtttgcatcatgtaacaaagcactggggatgttgctttgcgctaaaggtggataggcgacgatcagcacatcttctccctgcagggtataaaagtctgtgatgtttttggcaagtaaatattgagtggaatctgtgttgaaatccaccccataggtgataaaccttgcatttaacatacggctttgcatatatccgcaaatcagatttccgacttctacttctccggaatcttcacaagtgctaaataggttgattatatatactccgggagattttcgctcggtgaggaaacggagcaatgagttagtcaactctttcacggatgactggacgtaggttttcgtcattccgccatagcgggaggaaaacatactgggaatagcacctatcacgttgaaatctgtcacacgtttagtacgagctgcgtcacgcaatgttttgtcgaacatttctactaacagcaaaaaaacaataataagtatgaaactacctgcacaggcagccattatgatttgctttctgtttgttgctcccggagaaataggataggttggctcattcagaactttcagtgtggcggaagtcatctccagatttttccttcgtaataatgcttcattataactttgcagaacggtcaggtagttacgttccgtgaaattgatggttcgctctttttgtttgatggtggtacccacgggggcataaaacatatagcgttcactgagttcacggcgtgcattttgtacgaccagcagttcggctttcgctttttcattggccaatgtctgttccagccattgttctatgatattcgttcgcgaagttccttctttcgtatatttatgtcctacgtatgaatccgttaaatgattcaaatctttttgtagctcgtgcagttgcttcttttgactttccagattgtcggtatcttgtttcttggagtcggacatggcttctatttcagcaatctttccggtgacattggatacttgacgtaacttgtcaataaattccagattctttaatacttgtttggcattgctgtccatgtgtttttctaattccgcaagcatggcactgctgctattgaatgcaaaaagggcatcttgttctcttaattcaaactctttattaatagctgctatttctttggtttcgtcaagatagttgattacgcgtttctgaacattgtatttggtaaggtcttcttcttcgttgcgaagtttaccaccgattcttctcaattcttcttcaaagtatttgattactttgtctgtctctccataacggatacggcgatattcatcaacgaactcatccatcaaaatgcttacggtattgtatgcgatacccggatcgctggaagcatagctaatatccagcaagtcacttgtcagacggcgttgtactttgatgtttttcaaagtgttgtaactgtaaaaatggggattgtagtaaaatagcccgtagacgtaattgtctttgtgagggcgcatatacttttccagattagacactgtcttatcttcacttgttttgtcgatcagtgccagtatttcttttccatgcggactgttctttaagtgattgtaagtgtaattgtaactggaaggggtgattccgtcaacttctttgttcggatctcctttgataagaactctggcatataatctcatggatactctcttgagggtactctcggcctgcattatgcttatcaggttatccatagaattttgtaccatagcccaatctgtgcgcttgtcactctccaaattgtatcccgatgctactcctgtatataaagtggcttttacttcgtatcctccaaccatgtggcgggtgtaataaataacaaatagtgtgaaaagtgcggtacctactagtatcatccagaggtggcggagtaaggtccgtatggtagaaatgataaaatccatattttgtgcgttattatttttgtataaggggggtacgtgaaatcacttcgagtatcatcagactctttgtcaattcgaatttacttttttcgtatgcttcgcgagcttgagattgacgttccttgtctactgatagttctgacgaatcaatggtgccattggcaaaattcttttcagatatttcatattgtacgttggcaagtacccaaccctcacttctcatctggagaactttaatttgtgaagtagccattgcatacaactcaataatattctttttgatttcgtcatacttcacttcccgttccagttctgcacttcgcagcgtgagtctttgccgactgacgcgtcctttgagatcgaacagatcatctaaggggatgcttaaacccgcgcctatcgtgtaaccgttctgtgcctgggtggagtaggtaaggtatggggcgactgccacgtccgtataggtggactcattgccgaacattccgtattgatagctccctcgtaaactgaagaaacctagaaatgcccatttttcttttttgagtaatttgcgttctattatcgccttcacgtccgctacctcataggcgggactgttcttggcgttctcgaataaagcggatagtggggggagaactattttactataatcttcatcacttagttgagaatagtcagacacttcttgtgcaactacacgggttgtagagacgaatagaagtaataaccccgaaaaaaaacatataaattgcttcataaaaaaatcctattatttgctcttgctgtgttatagcttgcgcaaatataaggattaatttcatttatgtgcagtcttttattatctattttacaatctttcttgtaaattgtgcacaatttgtcgcgtaaatggcgtcaaaaggcttctgtcatgttgaagtagaacaaattctgcttgttcaccatgtctctgccgaaatcaaggcgtacattcatacggggttgcacttcgatacgtaatcccaatccgaggttgggaagcacaccttctattttgcccggagtgggtcccatgaatccgcatcctccccaggctacatatcctatatgacttaacatcttttttacccaagtgcttttgtccgtatttatcatctggcggtattcggccatcatgacatgcgaggacttgtcgcgaaactgtcccatgtagtaaccgcgaagatcgaagggggttccactaagtacatattttgttaggggtacatctccgaatgcgtttttgctttgcactgtccaggctatcactttgcggcgtcctactgttttgtattggcggtaatcgatttccaaacggtaaaagttattatcactgccgaacgttttattgtacatcattccccggaagtcaaggtaagttccgctataagcattggcgggaatatcgcgtgtgtcatacgtcaacaggaagccgagtcccgaactgaaatttttgtatccgtgctccgtacctcctgccgctatgtacgagggctcattaaccatcccggcagccggtttagttatcttgtcatagttcaaatcgacttgagggcctgcaaagaaattactttctcccagacggaacaagaaccaggggtttacttgaatgccgctataacggtactcgctggtatcttctccacgttcataatctttattagtggaatatccgatgccataaaaattctcgattgtatttttataagagaaggttccgaagatacggaaacggtcgcctttaaagaagagttgtggtttcgtcatcagattcaagccgcccttgaacatcaaggcgatggccattggcactactgaacgccgttgagtggtatcactcggattcatccgaaacgtcatcagtgcgctaccgcctactaataaaccgaagtccggcgtataactgggaccacctaatatgttatagtgcaaattccggtttgccacgcgctggcgacgcaactcgcgcttggaaagggcaggaatggtgtctgacggggtgccttcaatatctgtaggagtagtatcactgatagaagttgtagacatttgcagttcatcgctttttactgccgtactatcagccgtagctgacatcatattgatggatggaagcatcaccaatattcctattatatatttcttcatatttctctttgaggaattcgactgcaaagaaaactattttattccgattagttttgatgttcttagataataaatctaaaaaagaatcgtatttttgcagaataagatgtttttcgatatgctggtaaataaaattgcatgatttaatcccatacaccaaaacaaaatttatcagtatatcatgatccgtcagcctattaattaattatttatatcaatgaataaacagattttatcaatttttgttttctgtgctttttcttattctacacaagcgcaagaagtgaaaggaggcatcagcgactccatgatgcaacaaatcaagcagagttatgcaaacactcctaccgacaaggctatccgcaacgccatcggcaacaacgacatccgtaaactggctctcaaccaggataacctgaaaggcatggatacgcatttttctatcaaagtgtcttctaaaggtatcaccgaccaaaaatcttctggtcgttgctggctttttacaggtttgaatgtgatgcgtgccaaagcgatcgccaaacataacctcggttccttcgaattctcgcaaacttatcctttcttcttcgaccaactggagaaagccaacctctttctgcaaggtattatcgacaccagcagtaagccgatggatgataaaatggtggaatggctcttccgtaatcctttgagtgacggtggaacattcaccggtgtagccgatattgtcagtaaatacgggcttgttcccaaagatgtgatgccggaaaccaacagtagtgaaaatacctcccgtatggcaggtctgattgccctgaaacttcgtgaacaggggcttcaactccgtgatctcgcagcgcaaggtgtcaagcctgctgcccttgagaaaacaaaaacagagatgttgagcaccatctatcgcatgttagtgttgaatctcggtgttcctcctactgaatttacctggactgaatataacgctaagggtgaacctgtgtctaccgaaatttacactccgctttctttcctgaaaaagtatggtgacgaaaaactgattgataattatgtcatgttaatgaacgatccgagccgtgaatattataagtgttatgagatagactacgaccgccaccgttacgacggcaaaaactggacgtatgtcaatctccccatcgaggatatcaaagaaatggctatttcttctctcaaggatagcacaatgatgtatttttcttgcgatgtaggtaagtttctaaactctgaccgtggtctactggatgtcaaaaactacgactacgaatctcttatgggtacttcttttggcatgaacaagaagcaacgtatccaaagttttgccagtggctccagtcacgccatgactcttatggccgtcgatcttgacaaaaatggaaaaccgacgaaatggatggttgaaaatagttgggggcctgctgccggttatcagggttatctcattatgacagatgattggtttaacgaatatatgttccgtctagtagtagaaacgaaatatgcatcgaaaaaagctctcgaggtgttgaaacagaagcctatccgacttcctgcttgggatcctatgtttgctgaatagttctttttctttgcttctgtcttttgtttcggaacaaaagataaaagattacgtgcacgaacacgaaaggaattacggatatttttccgtaattcctttcttttttcctatcgaatcccaatcttatttattacttttgcggcaaatttatgaaaccattattttatatagcatggcaaatgtaataaagttacgtaaaggccttgacataaacctgaaaggaaaagctgctgaaacgtacgcaacagtaaaagaaccgggattctacgcacttgtacccgatgactttcctggagtgacgcctaaggtagttgtgaaagagcaggaatatgtaatggctggtggacccttgtttatcgacaagtatcatcctgaagtgaaatttgtttcgccggtgagcggcgtggtgacgagtgtagaacgtggtgctcgtcgtaaggtattgaacatcgtagtagaagctgctgcagagcaggactatgaagattttgggaaaaagaatgttgcttcgatggatgctgaagctgtgaaatccgctctgttagaagccggacttttcgcgtttatcaaacagcgtccttatgacatcattgcagatccgacggtaaccccgaaaggaatcttcatctccgcattcgatactaatccattggctccggatttcgagttcgccctcaaaggcgaagaagcaaacttccagacagggcttgatgctcttgccaaactggcaaaaaactacctgaacatcagtgtgaaacagaacgctgccgcactgacacaggctaagaacgttacaatcaccgcattcgacggaccgaaccctgcaggtaatgtaggcattcagatcaaccacctcgaccccgtatccaagggcgaaacggtatggactattgatccgcaagccgtaatcttcatcggtcgcctcttcaatacaggccatgtagatttcacccgtacagtagctgtgacaggttccgaagtgttgaaacctgcatactgcaaactacaggtaggcgcattgctcaccaacgtgtttgccggcaatgtaacaaaagacaaagatttacgctacatcagcggtaacgtgctgacaggaaagcaagtatctccgaacggattcttgggcgcattccatagccaattgactgttatccccgaaggtgacgacattcacgaaatgcttggatggatcatgccgcgtttcaaccagttcagtgccaatcgttcttatttcagctggttgatgggtaagaaggaatatacgttggatgcccgtatcaaaggtggcgaacgtcacatgattatgtcgggtgaatacgataaggtattcccaatggacattctgcccgaatatctgattaaagcaattatcgccggtgacatcgaccgtatggaagcactcggcatctacgaagtagctcccgaagacttcgccctttgcgaattcgtctgctcttcaaagatggaactgcaacgcatcgttcgtgccggactcgatatgctccgttcagaaatggcgtaatcgaataagagattaaataataaaaattaaaataagcgatagttgaaatcttgcgaaacggctctctgtggatacagcataaacccagtacagccaattttcaactctcaactttcaattttcaattaaataaatgaaagcgttaagaaattatctcgataagataaagccgaactttgaggagggcggcaaattccacgcattccagtcggtgtttgacggcttcgaaacattcctgttcgtgcccagcaagactgcgaaaacgggaacgcacatacatgacgcaatcgatagcaagcgcatcatgtcgattgtggttatttcgttaataccggctttgctgttcggtatgtacaacgtaggttaccagcatttcactcacacaggtgctactggcagcttcatcgaaatgtttatctacggattcctggcagtactgcctaaaataatcgtatcatacgtagtaggtcttggcattgagttcgtcgtagctcaatggaagaaagaagaaatccaggaaggattccttgtttccggtatcctgatcccgatgatcgttccggtagactgtccgctgtggattcttgccgtagctactgcattctctgttatcttcgcaaaagaagtattcggtggtacaggtatgaacgtattcaacgttgcgttgattactcgtgcattcctgttcttcgcatacccgaccaagatgtccggtgatgccgtttgggtgtcaggcgacagcatcttcggtttaggacaaagcgtagacggactcaccgttgccactccactgggacaggctgctacaacaggtagtgttcctgcgttcaacatggatatgattacaggtctgattccgggttctattggtgaaaccagcgtaatcgctatcctgattggtgccgttatcctgctttggacaggtgttgcaagctggaagacaatgatttccgtattcgtcggtggcgcattcatggcatgggtattcaactcaatcggcatggaaaacaacacaatggctcaaatgccttggtacgaacacctcgttcttggtggtttctgcttcggtgccgtatttatggctactgaccctgtgacttccgcacgtacagaaagaggtaaatatatcttcggattcctgatcggtgtgatggctatcgttatccgcgtactgaatccgggttatccggaaggtatgatgcttgccatcctgctgatgaacatcttcgctccgctgattgactactgtgtagtacaaagcaatatcagccgtcgcgagaaacgcactatcaagtctaaccaataaataccgaaagaaaatgaatacgaatagtaatagttatactatcatttatgcttcggtaatggttattatcgtagcattcctgctggcattcgttagttcttcactgaaatctacacaagacaagaatgtgcagttggacactaagaaacaaatcctcgctgcattgaacattaagaatgtggaagatgcggatgctgaatatcagaaatatgtgaaaggggatatgctgatgaacgtagacggtacgctgaccgaaaatacgggcgaatttgctaccaactacgagaaagaagcaaaagaacaacaacgtctgcacgtgtttgtatgcgaagtggacggtcagattaaatatgtagttcctgtttacggtgccggtctttggggcgctatctggggatacgttgcactgaacgaagataaagataccgtttacggtacttacttctcacacgctagtgaaactccgggtctgggtgctgaaattgcaaccgaccatttccaaaatgaatttgtaggtaagaagactttggaaaatggagctatcactttgggagtcgtaaaaaatggcaaggtagagaaacctgattaccaagtggatggtatctccggtggtacaatcacttcagtaggtgtagatgccatgttgaagtcttgcctgaatagttacttgagttttttaactaaataataaggaggagaaagatagaatatgggacaactgttttcaaagaaaaataaagaagtattctctgctccgctgggaattgataatccggtaaccgtacaggtgctcggtatctgttctgcacttgctgttaccgcaaagctggagcctgccatcgtgatgggactttcagtaacggtgattactgcatttgccaacgttgttatttcactgttgcgtaagactattcctaaccgcatccgcatcatcgtccagttggttgtggtagctgctttggtaactatcgtaagtgaaatcctgaaagcgtttgcttacgacgtaagcgtacagctttctgtttatgtaggtttgattatcactaactgtatcttgatgggacgtctggaagcatttgccatgcagaacggtccttgggagtctttcttggatggtgtaggtaatggtttaggctatgccaagattttgattatcgttgctttcttccgcgaactgtttggctcgggaacattgcttggtttcaatatcctgaattatgaaccgattcaaaatatcggatacgtaaacaacggcttgatgttgatgccgccgatggcattgattatcgtagcatgcatcatctggtatcaacgtgcacgtcataaagaattgcaagaacaaagtaattaattatttctgatttctgaattatgatttatgtctagctttatagtcatagtcgcatgataagtctgctgaatcataaattataaatcataaatcataaatcaaaaagaattatggaacatttattaagtttattcgtccgctctatctttgtggacaacatgatattcgcattcttcttgggtatgtgttcatacctggctgtttcgaagaatgtgaagactgccgtaggactgggtatcgccgtgactttcgtgttgctggtgacgcttccggtcaactacctgttgcaaactaaggtgctggctgccaatgctatcattgaaggtgtcgaccttagcttcttgagttttattcttttcattgccgtaattgccggtatcgtgcaattggtggagatggtggtagaacgcttcactccgtcactgtatgcttcgctgggtatcttcctgccgttgattgccgttaactgtgcgatcatgggtgcctctctgtttatgcaacaacgtattaacgttggtccgagtgatccgaaatacattggtgatatttgggatgccctctcttatgcattgggttccggtatcggttggttgctggctatcgtaggtctggctgctatccgcgagaaaatggcttactctgacgtgcctgctccgttgaagggcttgggtatcacatttatcacagtaggtctgatggcaatcgcatttatgtgtttctctggtttgaacatctaaaaagaaaggaataagacaatggatatgaatttaatattagcgagcattggggtattccttgtggttattctgttgcttgttgttatcttgctggttgccaaaaatttcctggtgccatcaggaaacgtgaaactgacaatcaatggcgaaaaggaattggaagttgcttccggttctactttgctcaatacgctgtctgtaaacggaatattcctgtcatccgcatgtggtggtaagggatcttgcgggcaatgtaaatgccaggtgcttgaaggtggtggtgaaattctgccttctgaagttcctcacttcagccgtaaacagcagcaagaccactggcgtctgggttgtcaggtaaaagtgaagggggatatggctatcaagattgatgaatctgtactcggtgtgaaagagtgggagtgcgaagtaatctccaacaagaacgtggctacatttatcaaagagttcatcgttgctctgcctaaaggcgaacacatggactttatcccgggttcttatgcacagattaagattcctaaattttcaatggattatgataaggacatcgataagagcctgattggtgatgaatatctgccagcatgggagaaattcggtttgttaggtttgaaatgtaagaacgacgaggaaacaattcgtgcttactctatggccaactatcctgccgaaggtgaccgtatcatgttgacagtacgtatcgctactccaccgttcaagccgaaagaacaaggtcctggatttatggatgtgatgccgggtatcgcttcttcatatatctttactctgaaaccgggtgacaaagtaataatgagcggtccttacggagacttccacccaatcttcgattctaagaaggaaatgatgtggattggtggtggtgccggtatggctccgttacgtgcgcaaatcatgcacatgactaagacattgcatacaactgatcgtaagatgtcttacttctatggtgcccgtgcgctgaatgaagtgttctatctggaagatttcctgcaaatcgaaaaggacttcccgaacttcactttccatttggcactcgaccgtccggaccctgctgctgatgctgcaggcgtgaagtatactccgggattcgttcacaacgtaatctacgaaacttacctgaagaatcacgaagctcctgaagatattgaatactatatgtgtggtcctggtccgatgtcgaaagctgttgagaagatgctcgacgatcttggcgttccggcacagaacctgatgttcgacaacttcggaggataatttgcagaagagaacaaaccggtcgggaaaatgaccggaaagaatatataacacagggtgggaaatctgaaaagcagtagtgcttcttggatttcccgtttcttttttagggtattccatgatgtctttacgctatgttttctatctattttatgtctgtttaaaagatagttctccttttttatctgtacttatctattatattcgtatatttggctacacaatagaattattaaagtacaataggttatggaatatcatcgtatatcttttattcacaatgatacagagtattcatttgtcaaagctatgagttcaagtttaacgggatatgccttggttaccgcttgtagggcagaagtaaccatttacatgaaagagaataatctgaaaggttattatatattgaccggcatggctaaagtttgattgtttttttatctccgtactctttcctttttgtatctttgcctccatgttagagaaaaatgaaattatacagtcggctctccgcaatttgaagattgaggaactgaatccgatgcaggaagcatcacttgaacaagctaccggaagaaaagacgttatactgttgtcaccgacaggatcgggcaagacattggcctatctgttacttttactccttactctaaaaccgaacgacgacagcgtgcaggttttgattctcgttccttcgcgtgagctggccttacagatagattctgtattcaaagcaatggggacttcctggaaaacctgctgttgttacggtgggcatcctatcgccgaagaaaagaaaagtatattgggcaatcatcctgctatcatcattggtactccgggacgtatcaccgaccatttgtcgaaaggcaatttcaaccctgaaaccattgaaactttaattatcgacgagttcgacaaatcgttggagtttggtttccacgatgaaatggcagagattattacccagcttccgggattaaaaaaacgtatgttgctttcagctactgatgcggcagagattcccgaatttacaggattgaaccgcacagttaagttgaacttcctttcggacgattctgaagaacaagagtcgcgcttgaaattgatgaaggtgctttcgccttccaaagataagattgatactttatataacctgctttgtacattggggagcagttcgagcatcgtgttttgtaatcatcgggatgcggtggaccgtgtacatcagttattggcggataaaaaactactcgcagaacgttttcatggcggtatggaacagccggaccgtgaacgtgcgctttacaagttccgtaatggcagttgtcatgtattgatttctaccgatctggcagcccgtggactggatattccggaagtcggacatatcatccattatcatttgccggtcaatgaagaagcctttacgcaccgcaacggacgtacagcacgttgggatgcgaccggaacgtcttatctgattcttcatgccgaagagaaacttccttcttatatcccggaagaaatggaaacagtggcgttgcctgaaaaccctccccggcctccgaaatcggtctgggctaccatttatataggtaaaggaaaaaaggagaaacttagccggatagatattgccggattcttatataaaaaaggaaatctgacccgcgaagatgtcggagcgattgacgtcaaaggacattatgcttttgtcgctgttcgccgggctaaggtgaagcaactcttgaatctgattcagggggagaaaatcaaaggaatgaagactattatagaagaagcgaagtaaagatcttttctgtaagataccttacttgacatctatggataacaaaatggtgtatatatcctgtataaaccaataaaaagaaaggaaaatctgctttaaaacagtatttttataaggaaagatttgtgcggcggaaataaattcgtaaattcgcaaggtcaaaagacaaaagtaacgaaattgttaaaccaaaaacaaacttcaaatgaaaaagcataatttcaatgcaggaccttccattcttccgcgtgaggtgatagaggatacagcgaaggctattttagatttcaacggttctggtctctctttgatggaaatcagccaccgcgccaaagacttccaacctgtggttgacgaagcagaggcattattcaaggaattactcaatatccccgaaggctattcggtactgttcctgggtggaggtgctagtatggagttctgcatggttccttataacttcctggaaaaaaaagctgcttacctgaacactggtgtatgggctaagaaagcaatgaaagaagctaaagggtttggcgaagttgtagaagttgcttcctctgctgaagctacatatacttatatcccaaaagattatacaatcccgacagacgcagattatttccacattacgactaacaacacaatttacggtacagaattgaagaaagatctcgattctccagttccgatggttgccgatatgtcttctgatattttctcacgtccgatcgacgtttctaaatatatctgtatttatggtggtgcacaaaagaatctggctcctgctggtgttacattcgttatcgttaagaatgacgcattgggtaaggtttcccgttacattccaacgatgttgaattatcagactcatgttgacagtggctctatgtttaacactcctcctgttgtacctatttatgcagcattgcagacgcttcgctggatcaaagcacagggtggtgtgaaagaaatggaacgtcgtgccattgaaaaagcggatatgttgtatgctgaaatcgaccgtaacaaaatgttcgtgggtactgctgccaaagaagaccgttcacgtatgaacatctgtttcgtgatggctcccgaatacaaagacttcgaagctgacttcttgaagtttgctactgaaagaggtatggtaggtatcaagggacaccgttctgtaggtggtttccgtgcatcttgctacaatgctctgccgaaagaaagcgtacaagctttgattgattgtatgcaggaatttgaaaaacttcattaataatattttcaccacagattatacagacggacgcagattttttttattctgtgagaatctgggtaatctgtggtgagtctttataaacagaattagattatgaaaatacttgtagctactgataaaccgtttgctaaagttgcagtagacggtatccgtaaagaaatagaagcagccggatacgagtttgctttacttgagaaatatacagaaaaagcccagttactggatgcagtgaaagatgctaatgccatcattatccgtagtgatattgttgatgcagaggtgcttgatgctgctaaagaattgaaaatcgtagttcgcgccggtgcaggatacgataatgtggacctggctgctgccacagctcacaatgtatgcgtgatgaacactccgggacagaattctaatgctgttgccgaacttgctttgggtatgatggtatatgctgtccgtaacttctataacggaacttccggtacagaattgatgggcaagaaattgggtattcatgcttatggaaacgtaggccgcaatgtagctcgtgttgccaaaggtttcggaatggaagtgtatgcttatgatgcattctgcccgaaagaagtaatcgaaaaagatggtgtgaaagcacttgattctgcagaagaattgtacaagacttgccaggtggtatctcttcatattccggcaactgccgaaacaaagaactctatcaattatgctctgttgaaagatatgccgaaaggtgctatgttggtaaacactgcccgtaaggaagtgattaacgaagcagaactaatcaaactgatggaagagcgtgcagacttcaaatatatcacagatattatgcctgctgctaacgcagagtttgcagaaaagtttgccggacgttatttctcaactcctaagaagatgggtgctcaaactgccgaagcaaatatcaatgccggtattgctgctgctcaacaaattgtgggcttcttgaaagatggttgcgagaaatttagagtaaacaagtaagattctgaataagtctgccggatttttcaggataactatggtagtatctgaataaaaacaatccgttgcagaatgtcttttttagaaataagtagtatatttgagccacagattttcaagaagtctgtggctttaattttttacatataaaatactaatatcatggcaataatcaaacctttcaagggcattcgtcctccgcaaaacctcgtagaacaggtcgcttcacgtccttatgatgtactgaactctgaagaagcccgcgcagaagcggaaggtaacgaaaagtctctttatcatattattaaaccggaaatagatttccctgttggtatggatgaacacgacgaacgggtgtatgctaaagctgccgagaatttccaactgtttcaggacaaaggctggttggtgcaggataataaggaaaactattatatctatgcccagacgatgaacgggaaaacgcaatacggattggtggtcggtgcttatgttcccgattatatgaatggtattatcaaaaagcatgagcttacccgtcgtgacaaggaagaggatcgtatgaaacatgtacgtgtgaacaacgcaaacattgagcctgttttctttgcttatcctgataatgagaagctggatgttattataaagaaatatacagcaaacaagccggtttatgactttatcgctccgggtgatggctttggacatactttctggattgtcgaccaggatgcagatattgctaccattactgccgaatttgctaaaatgcctgctctttatattgctgacgggcatcaccgttctgccgctgctgcattggtgggagcagagaaagcaaagcaaaatccgaatcatcgtggtgatgaagaatataattacttcatggctgtttgcttccctgcaaaccagctaaccatcatcgattataatcgtgtagtgaaagatctcaatggtttgactcccgagcaattcctggctgcacttgataaaaactttatagtagaagagaagggtgcggatatctataaaccatccggcttacataatttttcactctatttgggtggtaaatggtacagcttgactgctaaggccggtacgtataatgataacgaccctattggtgtgcttgatgttacaatctcttccaacttgattttggatgaagttttaggtataaaggatctgcgttctgataaacgtattgattttgtcggtggtatccgtggattgggagagctcaagaagcgtgtggatagcggtgaaatgaaagtggctttggctctctatcccgtatctatgaaacagttgatggatattgcagatacaggcaatattatgccgccgaagactacttggtttgaaccgaaacttcgttcgggactggtgattcataagttagattaaaaaatatctgtaagatgatgcgaaaatcattgttgatagggactatatcagtagatgtgacgcttgattgatgtagaaaaaatagtgacgggatatgcccgggatagtgacggtatcgttgtggtataccgtcactatttttattggatagcgtcactatttttaattcccccaactgcctatcatcgataagtggaacattaatatttccaaatgatagattgacttttctcattaaagccgtatctttgcaacatgactgctgaagatacttataaaaccatcattgagccttccgaaggtatttatacggaaaaacgaagcaagttcattgctatagcccttcctgtgcgtactctcgatgagataaagatgcatcttgaaacgtatcagaaaaagtattatgatgcacggcatgtatgctatgcttatatgttgggagctgcgcgaaaggatttccgtgccaatgacaacggagaaccttccggaacagcgggtaaacctattctcggacagataaactcgaatgaactgacggatatactgattatagtagttcgttattttggaggaatcaagttggggacaagtggattgattgttgcttacaaggccgctgctgccgaagcgattgctgccgctactattatagaaaagacggtagatgaggatgtgacggtaatgtttgaatatccttttatgaatgatgtcatgcgcattgtgaaagaagaggaaccggagattcttaatcagtcgtatgacatggattgtagcatgacattgcggattcgtcgttcgatgatgcctaagttgcgtgcacgtttggagaaggtggagacagcgcggattcttgatgatgagaatattttgtaggtaaagtattagaagtagtaatagagatagagagtggattgcatgataaataaatgtcacataatttttagtctgtttttaagttcctttgtatggatgagcgttcaggcgcaagcacaaatacaggaaactcaaaaactggctcctaataatattcctgttccgtggtattcgcagaaaatcgcgggatgcccttactcgcattgctctctggcttcttcgttaatggtctttgattattttaagggaatgacggctgatacacaacgtacagcccaggatgcagaaaagaaactgattgaatatcagcggaactactttctgaaaaaacgtgctcctttccgtcgccgtacttcaatagggcagggaggatattattcttttgagattgattcgttgacacgttattatgaaaacatgataagtgccgaacatttccagcagaaagattatcggatattgaaagattatattgatcgtggcattcctgtgcttgtaaatgtgagatatacaggtgcagttcgtggtttgcgtcctggtccgagagggcactggatggtgcttcgtggcattgatgataaacatgtgtgggtgaatgatcccggacgttcgccggagatgcggactaaaggagaaaacatctgttatcccattaagaaacagccgggtaacccttcctattttgatggttgttggacgggacgatttatcatagtcactcccagagaatggatacgaaactccctgtttgcacaggtaggcaagctccctccattggaggaggtgactcatatagttcctccggttgtgtcgtctgtaaccttaccgcaggttatcaatcagtagaagcaactcatagttaggaaaattcagtagtagaattaagatagaacatttgtagtaaaataaagaagaacaaaaatatatggcatttgaagcaaccaaaaaagaatggtgcgaactctattctttctttcgtctcttagcagatggaaaagtagtgttaggcacagcagaagcaaaggcgggagatacattttggcctgttgcaatgattcaacgggaagaacatgatggaacacgtcaatattatattgaagaagatacgattcgtatagaaggagagaatgggagtaagtccatgcctcgtgaagattttggtattgtagctgatctgatattacaggctgtgaaatcttcgccggaaaatgatgttgcttctccagaaggagtagaagagtttttagacgaagctgccattttcgatttggaagcaaaaacagaagatcgcacagatttttccattacattttggcatccgaaagctccgttaagaggtttcaatgtccgttcacggttgggcgtaatgaatccgttgttggacggaggacgtgcagcgaatcttaaactggaacagagtggagtcaaatttgccactccaacagtgaataaaatcaatgctttgcctgaatctccgaatgaagttgccgaacggatgatgatgatcgaacgtttggggggcgtacttaaatacgctgatgtagccgaccgcgtattccgcagtaatcttttgatgattgatctgcattttccacgtgtactgacagaaatggttcgtatcatgcatttggatggtatctcccgtattagtgagttgacggaagttattaaacaaatgaatccgttgaagattaaagatgaactaatcaataagcataagttctatgaattcaagatgaagcagttcttgatggcattagtattgggaatgcgtcctgcaaagatttacaatggattggattcggcagtggaaggtattctattggtggatggaaatggagaagtgctctgttatcataaatcggaaaagcaaataatggaggattttttgtttttaaatacccgtttagaaaaaggatctttagagaaagacaaatacgggttcctggagagagagaatggagtctattatttcaaactgaatgcaaagattgggctggtcaaacggtagaaaagtataatgtattgatgcagttaaactaataatgatggcatacttatataaaatacttgttatccatgaaaacaaatgaagttttagagaacattaaagcacgccgtagcgtacgggcttatactggccagcaagttttagaagaggatttgcaggctattttggaagctgcaacttatgcaccgagtggaatgcatctggaaacatggcattttacggctattcaaaatatggataagttgacagaactgaatgaacggattaaaggggcttttgcaaaaagcgacgattctcgtttgcaggaacgtggacatagtaagacttattgttgctattatcatgctccgactttagtgattgtatctaatgagcctactcaatggtgggctggtatggattgtgcttgtgccatagaaaatatgttcctggctgcccagtctttaggtatcggctcttgttggatcaatcagttggggacaacatgtgatgatccggaggttcgtgaatttattactgctttaggtgttcctgccaatcataaagtctacggttgtgtagctttgggttatcctgattcgaagattccaataaaagagaaaaaggtaaaggctaatacaataactatcgttagatagaatacagcttcttgtctgataaaataagaggctgtgtcgaaactctcatataaaaatcaccctcgccacagaaagttgtagcgagggtgatttcgataaaaggggagttttgatacatccccttatttttgtgaggtgattctttaagagacagtgctctgtaaatctctttggatagacctctttttactcgaaagtaccatagcgagtgggtagtagcttacggtctcccaaggtgttatctacgcgagctacatttatccagaatttattatcacgtacactttctataggataagctgctttctcgcgtgtatatgagtgctcccaacgatcacttacaatttcatattctggatgaggagcattaatcaatacattatcatctttatccgcttcgccattcttcacttcttgaatttctttccagatattcagcatgacatctacgaaattgtctagttctgccagactttcactttctgttggttcaatcatcaacgtaccgtggacggggaaggagagggtaggagcatgataaccgtaatccatcaggcgtttggcaatatcattctccgagattcctgcttcttcatgtactttccggcattccagaatcatttcgtgccctacgaaaccgttggctccccgataaacaactccatacgtatctttcagacaagtagccagataattagcgttcaggatcgcaattttagttgcctgtgtcagtccttctgcacccatcatgcggatatatccgtatgtgataggcagaatacctgcactgccgaatggagctgccgatacttgattttgtgaattgccgaagattccgtgtccgggaaggaaaggaaccaaatgttcggctacgcagataggaccgactcccggacctccgccaccatgaggggaagcgaatgttttatgaagattcaagtgacagacatctgcaccgatgaatcccggattggttaatcctacctgtgcattcatgttggctccgtccatatatacttgtgcaccacaggcgtgaatgatgtcgcaaatctcttttatctcggtctcgaagataccatgtgtagaaggataagtaatcatcagtgcagccaattcatctttattttcttcagcttttacacgtaggtcagccatttctacattcccctgctcgtcgcatgcacaggtaacagttacgaagcctgcctgtatagcagacgcaggatttgttccgtgagccgaagctggaatcaagactttgttacggtgtccctgaccgatactttcgagataggtgcgaatcacacgaaggcctgcatattctcctgcagcacccgaattgggttgtaggctgacccctgcaaacccggtgataactttcaaatcttcacttaggttcttgattaattcacgataaccttctgcttggtcttccggaaccagcgggtgcatacccataaactcgggacggcttaaaggcaacatttctgcggctgcattcagcttcattgtacatgaaccgagggaaatcatggattgtgcaagagaaatatctttgcggtccagacgtttgatgtaacgcatcatctctgtttccgtgtgatacttgctgaatacttcatgtgtcaggaaaggagttgtacgttttaaatccttgtcgatgttgcttctttccggaatgtcgtctactttctggtaatcttttccggcggcaatggcaaaaatcgagagcaacacattggcagctgccacatctgttgtttcgtcaatgctgaaaccaacattgccattttcataatagcgcagattaacttctttggtaagtgctatcgtgcggatttgctgtgccgaaacgtgttcgggcaattcgaaacgtaaggtgtcaaagtattgagcgttgacttgtgtatatccgcatttctttaattgcttttcaagaaatacagtaatgctgtgtatacgtgatgcaattgtagtgataccctcctgaccgtgataaacggcgtaaaagcctgccatagtagctaataatgcttgtgcggtacagatatttgaagttgctttttcccgtttgatatgttgttcacgtgtctgtaaagccattcggtagcagagtttgccatatttgtctttagaccatccgatgattcgtcccggcatattccgtttgtattcgtctttggtagcaaagaaagcagccgatggaccgccatagaacattggggtacccaagcgttgtgtggttccgaatacaatatctgctccccattctcccggaggagttagcagggcgagacttaaaatatcagcggcaacagctactttgcagtctgcggcatgtgctttttcggtaaattcagaatagtcctctacgtttccatgtgagttcggatattgcagaatacaggcaaacacttccggtgaaggttcaaaatctttatatttacctacacgtagttcgatgccttgaggtacggcacgtgtagtcatgacagctaatgtctgcggaaaaatattctcgtctacgaagactacgttcgcattggctttctgttgcgcgcgggagcgtaaggcatacatcatgcttacggcttcggcggcggcagttgcttcgtccagaagtgagcagttggcgagtggcatggcagtaagatcacatacggctgtctggaaattcatcaatgcttccagacgtccttgcgatacctctgtctggtacggagtgtaagaagtataccatactgggttttcgaatacattccgctggataacggccggagtgatcgtgttgtaccatcccaaaccgatatatgtggtatatagtttgtttttagctgccagttcagcgatgtgttttccaaattcgtattccgtcagtggactagtcaatgcaagcggctctttcagccgtatattggcgggaattgtctgattaatcagttcgtccagtgagttcacgccaattttgcggagcattatggctgtatcttgttcattgatgccgatgtgacggctagctaacaaatcggttttcataataatcaagtattaaattaagtattaagtatcaagtattaagtattactgcggttaatgggcgattagccttgttaatacctaatacctgatacttaatacttcttttttattatctaaaaaatgggttttcagctttttccattccgatagtcgtgggagcgccgtgtcccggataaacgactgtttcgttgggaagaacaaataaacggctgcaaatatgttctatcagttcatcgaagttgcctcctgtgagatcagcacggccgatgctgccttggaacaggacgtcaccggagaacatgcagttgtcttctttgcaatagtacaccaagctgccgggtgaatgtccgggcacgtgtattgcttccagtttggtatgtccgaaagtgatgatatctccgtcatgcaggtatttgcccagtggtacaggttcttcctgcaactgaaaaccaaacattctgctttgtttcggtgcttcgtcaatccagtactcgtctgctttgtttgcttctgccgataacccgaattctttcagcatgaacggatttccgaagatatgatctaggtgtaaatgagtattcagcagatgctttacattcagttcattggtaagaatgaactttttcagtgcctgcttttcttcttcatagaaacagcccggatcaattacgactgcttctttagtgtcatcccataatacgtagcaatttacgggaaacatattaaattcaaatctttttattttcatggtttctctatgatttatcatctatcagaacatatagtcttgtttaaatcggaacatataccactttttttgttttaaagaactcttcctcgaagttgtcgctcaagctatgaatgaccgttttatgtttgaacggcattgtttcatgctccagttcaccgcctttgagacagataagtccgttgggcaatgcattctgttgtttcgaagagatattctttttaataatcttaatcaaatccgccaaaggcattacggcacggctgacaacaaagtcgaacgttcgtttctcctcttctgcacgggcatggcggaaagtcacatttttcagtccgatggcatttgccacttcggttgctacacgtacttttttgccgatactgtctacgaggtggaattttacctcgggaaacaggattgctaaaggaatgccgggaaaacctcctcctgtacccaagtccatgatgctggttccggggcggaattggatgactttggcaatgcctaatgaatggagcacgtgatgctcatataaattctcaatgtccttgcgggagataacgttgatttttgaattccagtcagtgtagaggtcgtatagagctgcgaattgtttgcgctgctcttccgtcagatcaggaaaatatttcagtatgatttccactgtttgaattttgaattataagttttgaatgatagatgtggatgaatatcctattctgtcacatggaagtgataacaacaggatattcattggtgttcagctttttatgatttttaattttttagctctcccagaatcgggttactgcctaatagatgttccatcatagcaaatgggattgttacctttacaggtcccatagaataaggagtgatatcgtatacattataatagaaggtgattccttctttgcttagatagaaattttctgtcggagcgatgtccccggtggaagcatatcccatatcttccaatgcttcgtgagtggtcactttgttatctgccatgagctgattccagatcaggtcggtcaatgcgtctttgtagtctccgacaaaaatatcatcgaggcggagcggacgcatcagggtgaggtccatatttaaataagttgccatgtaaattccatgtgcacctccggtatattcgttatagtcgatgcgatatacaagtagatctttatcatacagttgcacatggctttctatacctttataataagaataccaggcaccgatggaagattcgtcttccttgtctttctcatcttcggtatacataggctcgagatcgcgacggtattcgctgatataattctcggtatattgctttacaacttcttccggtttttcgccgatgtatttatctccgaaacaggccgaaatgaaataagtattcagactgtctttcagcatatcatccgatgattttatcggataagcaaaattaataataatattgcaggccggtttggctgtatcattgaagaggtgagctgtcttattcacttgaatgctatcaaactgtaacgcacctgtgtttttgttcatcttgtcatgacaagaaaacaaaaagccgcttaccgaaagtataattgcaagcagactgacatattgttttttcatacccattttttctgtaaattcaacatttgttttatcattcactattgacaaatatagatgaaattcgtgaatcgggctaataaaaacagaaaaaaatgcagctatttatccccaaaaatgggattggcggatattatccgccaatcaatgcttgcaaactttagtgatatctactgtgaatccatcttcagcaggcataaatttccctttcattttcagaaattcgataagggtatctacatccatgttttctgccgagcaagcataaaaacgttgctgtgagccaaacttcttaatgattgcttcccgcaatgatgattccgagtagctatttccttccatcatgtggaggacttcatgagcatgtaattgttccataatcttttttctgcaaagatagggcagagattgcttggaaactgtaacatatgtgacaaaactgcataatattcattgaaaattgaaaataaccatttcactatgcgttcctattctgaagggtggtccccaaagagacaatccggaagatacatacacgtgactgtttccccattggcgataaccgtggctttgctcgaagatataatcggtcacccaattaataggccatatttgtccgtggtgtgtatgcccactgaattgcaggtcgatgccggcagcttccgttttttccaaatcaaaaggttgatgatccaataaaatgataggtttgcttttatcgatattcaccattaactcttgcagggaatgacgcttgcggttatgacggtcatcacgtcctatcagttgtatgccgttgggaagtgtaactactgaatcgcgcaataattgtatttgagtgcttttaatatatcggatactttcatcgataccgctaatgtattcgtgattgccgagaaccatatagatacccataggagctttcaagttagctaattcttccgccatattctctgtataaagaggtacgacgctattatcaatcaagtcaccactaatcagtatcaggtcgggatgctgcgcatttatcatttccacatatttttttaatgcggctttccctgtaccatttcccaagtgaacatcgctgattgcgacgattttaattgcttggggagtatcttcatatcgtttattggttaaaatgctgactacattggtttccgggtgatgatagttatataccccacatcccagcaatcccaacgtgaacactaaagacagatagaacctatatttgtagacaactttgaataatttcaagatatcaaacaaaagcaagaataatgccatgtatagagtaaatatcaaccaacttgttccaatggtgtacattgaatgggagataaagacaggcatctcaaggttacgagttagcatcgtgccgaaaaaggataaagcacatatccagaataaaacggtcaggaatatttttactccgagagatttaactttcagagcttgctttgctctgataaatatgtaggcattacctgccagataaagagtgataatgatgagtaaatatgtaagcatagcgtttacttaaaaatcagagaatttattggggcaaagataggttttattgttgagtaaaaagagttaatagtgctgatatgactctaaaatagccaaataaaggaaagagaatgtgtctgtatcggattgattgaatcttaattacgaaaaattataggaaaatctgtttttattcttatctttgtcctctgaaatgaaaaaactagcctacataacagcacttatcctttctctcctgattatctattcaggaggtggagtctctattgtgcattattgctgtgtccgttgtgaaacggtgcagagctgttgtgatacaggctgtccgaagtgtaaaaagactcatacttgtgattcaaaaaaaggttgtaaagataagggttgtacagctattatctataagcttgatttgatgaaacatactactgaactgacaacatcagctttagtagtcgatcttttgtgtgagcatttttgctatctgttgactccgacctatgcggataaatcggtagaatatgatagtctgacctctccgccacctctctgttcgaggcagaagctggcgctatattccacttatattatttagccactatttctttcttatttaatcctttgctttcaatagaacatgaaagtaaagcagcactgaatgcaactaagttgcatgagaaatgaattaattttgtatctcgaaagtaactttagaaagaatgaaatatatgataataggactgttcctgttatttgccggtaatatatatgcgcaagtacggggaacagtgaaagatagtaccggggaggctattccgggtgccaatgtgttctggatgaatacaggacaaggagtgacaaccaaagaggatggtagtttttctatcactaaaccttccaaaagccacatgctgattgtcagctttatcggttttcagaacgacacgattcatgtgagcagtaaaaatcaacaactggatattgtgcttcgtgatggagtggagctgaatgaagtaaatattgtcactcgtaaactgggaacgatgaaattgcgcagtagcgtgatgaacgaagacatgataagcagtgccgaattgagtagagccgcttgttgtaacctgggggaaagttttgtgacgaacccttcagtagatgtgagttattccgatgcggcaacaggagccaaacaaattaaattgttggggctgtccggcacttatgtgcagatgttgacggaaaacatcccgaattatcggggagccgccgctccttatggattgggatatgtccccggtccgtggatgcagagcatacaggtttccaaaggaacatcttcggtgaagaatggttatgaagccatcacaggacagataaacgtagaatttaagaaaccacagttgccggaagccgattgggtgtctgccaacctttttgcaagcactaccaaccgatatgaagccaatgcggacgctacattgaaactttccaaacgatggagcacttctctgctggcgcattacgaaaatgagaccaaggcgcatgatggcaacgatgacggatttgtggatattccgcaggtagaacagtataatgtgtggaaccggtgggcatacatgggcgaccattatgttttccaggcaggtatcaaagccctttctgaaacacgtaccagcggacaggccaatcatggagggacaatgcactccggtgacctgtataaagtagggatcgatacggagcgctatgaattcttcaccaagaacgcctatatctttaataaggagaagaatacgaatctggctttgattctttccaccactttacacaatcaggatgctacgtatggacgcaaactgtataatgtggatcaaaccaacgtctatgcttcgctgatgtttgaaacggaatttaatccgcaaaatagtttctccgcagggttgagcttcaattatgacgcttatgaccaacattaccgtttggaaaatacaacggacaatccgctcaaagcctttgaaaaggaagctgttcccggtgcttacgtgcaatatacgttgaacctgaatgataaatggatggtaatggccggtctgcgtggtgattacagtaacgaacatggtttcttcgtgactccgcgtgcgcatcttaaatacaatccgaatgaatatgtgaatttccgtctttctgccggaaaaggatatcgtaccaatcatgtgttggcagaaaacaactacctgctttccagcagccgtaaggtggaaatagcaaagaacctggatatggaagaagcatggaactacggtgccagcgtctctacttatatccctatattcggcaaaacgctgaatgtgaatgcggaatactattatacggatttcctgaaacaagtgatagtggatatggatagcaacccccatgaagtagctttctacaatttggatggacgctcttattcgcatgtgttccaagtggaagcaagttatcctttcttcaaaggattcactctgacaggtgcttaccggctcacggatgcgaaaacgacctacaaaggtgaacgaatggagaaaccgctgaccagcaaatataaaggactactcacggcttcttaccaaactccgctgggaatatggcagtttgacgctacactgcaactgaatggcggcggcaggatgcctactccttatgaactgggagacggacagttatcctgggaacgtcgttatggcagttttgaacagttgagtttacaggtgacccgttacttccgccgctggtctatctacgtaggaggcgagaacctgacaaacttcaaacaaaagaatccgattatcgatgcggcaaatccctgggggaacaactttgattctaccatgatttggggaccggtgcacggagcaaaaggatatatcggaatacgttttaacttagctagaaatagcgagtaaaaacgggaaatagcgaatgaaagaaacgatcgcataataaagaatattaattttaaactgataagaaaaatgagaacaaaaagatggatggccacttgcgtggtggctcttttgagtgtaacagttgtattggcaaaagatattcgtgttgttgtatttaaagtgtcgcagatgcactgtgagaaatgcgaaaagaaagtaaaggacaatatgcgttttgagaaagggctgaaggatatttcgaccgaagtaaaaacgaaaatggtaaccattacgtatgacgctgaaaaaacgaatgtaaagaagttgcaggcagggtttaataagttcagttatgaagccgaatttgtaaaagaaacaaagaaagacgatcagaaggctgataagaagtaattgaacaaatacctgtattagcttgtttctataaacaaacaagggttcttccccaacttctttttgagaggaggggaaggccgtaaacaataattatatgggtaacacaacaaaaaaggcatttcctgtgcttaatatgcattgtgcaggatgtgccaataatgtagaaaaaacagtaaaaaaattgccgggagtcattgaggcttccgttaattttgctaccaatacattgaccgtttcttatgagaaagagcagctgactcccggagagattcgtgcggctgtgcttgcggcaggttatgatctgattgtggaagaagcccacaaagaagaacgccgggaagaggaacagcataagcgttacactcgtttgaaatggaaggtaattggagcgtggattttggtagtaccattgttggtatattccatgatactgatgcatgtaccatactctaatgagattcaaatggtacttgctatccctgttatggtctttttcggaggtggtttcttcaccggagcctggaaacaggctaaattaggacggagtaatatggatactttggttgcgcttagtacttccattgcttttctgttcagtctgttcaacactttcttccccgaattctggtatgaccgcggattggaaccgcatgtctattatgaggcttctgcggtgattatcgctttcgttcttaccggaaagttgatggaagaacgtgccaaaggaaatacctcaacagccattcgtaagttgatgggaatgcagccaaaagcggctcgcgttctgcgcaatggagtggaggaggagatcttgattgagaaactccaggtaggtgatttggtggttgtacgcccgggagaacaaatacctgtggacggtcagctttccgaaggcgactcgtatgtcgatgaaagtatgattagcggtgaaccggttccggtagaaaagaagaaaggtgataaagtattggcgggaacgatcaaccagcgtggctcatttatcattcgtgccgcacaggtaggcagtgaaaccgtgcttgcccgtattatcgctatggtgcaggaagcacagggcagcaaagctcccgtgcaacgcattgtcgatcgtattacggggatttttgtacctgtcgtattgggcattgccattctgacatttgtattgtgggttaccattggtggtagtgaatatatttcttatggtattttgtcggctgtttctgttcttgtcattgcttgtccatgtgctttggggcttgctacacctactgcgttgatggtgggtataggtaaagctgccagccagcatattctgattaaagatgcagtggctttggaacaaatgcgcaaagtagatgtcgttgttctggataaaacgggaacactgactgaaggacatcctacagctaccggatggttatgggcgcagtcgcaggaaccacatttcaaagatgtacttttagctgcggaaatgaaatcggagcatccgcttgccggcgctattgtctctgcgcttcaggacgaagaaaaaataaaacctgccgcgttggatagctttgaaagcattacgggaaaaggaatcaaagcctcgtatgagggacatacttactgggtaggcagtcataaactcctgaaagatttcagtgcgacagtaagcgatgtgatggctgaaatgctggttcactatgaatcggacggtaacggcatcatttactttggacgtgaaaacgagttgctggctatcattgctgtttccgacccgataaaggctacttctgccgaagcagtgaaggaactgaaacgtcaagggattgacatctgtatgctgacgggggacggacaacggactgcactagccgtttcttcccgtttaggaatcgaacgttttgttgccgacgctctaccggacgataaggccgaatttgtacgtgagcttcaaatgcagggaaagaaggttgcgatggtgggcgatggtatcaatgattcgcaggcactggcattggctgacgtcagcattgctatgggaaaaggaactgatattgctatggacgtggctatggtgactttgatgacatcggacttgttgctgcttcctaaagccttccagttgtcaaagcagacagtcaaactgattcatcagaaccttttctgggcgtttatttacaacctgatcggtattcctattgctgccggtatcttgttcccgctgaatggtttgttattgaatccgatgctggcaagtgccgcaatggcgttctccagcgtgagcgtagtgctcaattcgttgagcttgggacgaaaatgagaaatgaactataaaaagacaggaacctgtaagctgtaaacgatgaatggtaagctgtcatttatgaacagcgaactgtaaataatagacggtgaatactttgcggataatacgcaatttattcaccgttcattgttttacaactcaccatttatgttttctatcgtccttcgtataaattatctgtttctaaattccaatggcgtcattcctacatatcgtctgaaatacttgccaaagaaagaggcactggggaagtttagagaatatgctatctcttggatagtcatattggttcctttcagtttggctttagcatccataatgacaatatatgcaatagtgtccaatacacttttacctgtcacttgtcttactgtcgtacttaaatgttgaagagatatacctaatttatctgcgtagaactgtgcacgacgttcgtttttataattctcggtgataacatgaatcagttcccggcagatttctttttttcgattcgaactaccgttttcacccggaaatttatgatatatcaatcgtatgcttgtcaggatggtctgaagagacaattcaaccaattcagaatccatttcgaagttctcattgcagctggcccgtgataatagagcaaaatagtctttcagataactggctacctcttcattaagaggaaccaccggctgttctatcagtttgggatatgcgttaccaatattcttcatcaggttgattcgtccggcgcaatgtgcggaaaagccggcaaagcaaaggcataccttttctgttctctcccgaaactgaatgattgttcccggtaacagagttatcaggtcattaggacgaatctcataatcaagcagattgatggaggctttcatcgaaccttcggtacagatggcaacaatacatgcttgcaaccggcaagattgcttgtaaatattgagaatgtcttctgttacattcgtccatgctaatacttcggtaggcaagtctacctgtggaaagtccattttcatagttgtgtgtgttatattaggccaacaaatgtacgcattttctttttatttcttacctttgtttttatgaaaacattttttattgattggaatttgataccatacgccgaagcatggcaacggcagacagaatggtttgataacattgtccgggcaaaagttcagggcgagagttatgaaaaccgtattgtgatgtgcgaacatccccatgtttatacattaggacgtagcgggaaagaaaataatatgttgttgagtgatgaacaactgaaagcaattgatgccaccctttatcatattgatcggggaggggacattacttatcatggtccgggacaattggtatgttatccgatattaaacctggaagaatttcagttaggattgaaagagtacgtgcatttgctggaagaagcggtgattcgggtatgtgctttttatggcattgaggccggacgtttggagaaagcgacaggagtctggttggaaggtgatacgcctcgtgcgcgtaagatttgtgctatcggagtgaggagcagccattatgtcacgatgcatggactggctctgaatgtgaataccgatttacgttatttcagttatatccacccttgcggatttatagataaaggcgtcacttctcttcgtcaggaattaaagcacgatgtgccgatggacgaagtgaagcaacgcctcgaagaggagcttagaaaactattccaactcccagttgccaggtgcggcgcataaagcaatctttatcagccaaggcgtatgagaagtctgcacgtatcggccagaagtttattccgcagcctagggtgccgtagttgcccgctcctttgtctttgtctccgaaatgatatcccgcacggacaacaccatatttcaggaaattatattcagctcctatgccagcctggagatgacggatttcagaggggagcagatagttgaagtcgagagccacttgcaaacggttttctatgctgaatggcaggtcgattgtacctcccaatcctaatctggcgggtaacttttgtccgtccagctttttacctaagttggcagcttggaaaccaatgctccaggaagccatttcgtccaatagagccatattgcgatagtaggtcgcgccgaagtccagacaaacgctattcttgctgtctgcgttttccgcggctttggcttgcaggtatctgaacgttaatgaaagagacagatttttggctacatttctgaaataagcagcttctaaatcccagatatgaggacggtaatcgaataccttaggatctttgaaatgccggaaacctacagcaaatccatgtatgccttcccttccgatccggtagaaaagagaggcgctatgtagcgcataatcttggttgatcttagcgtatgaataactcgcacccatcacttcttgtgagaaagcgatggtagaagcattatgaaaaatagctgtactaccgttatcggtggtagctaatcctgtacctgccatacctgccgattgggcgtccggagtaagttccagaaaataggcgcttgccatttcttgtgctcccagcaaagtggggaataagcacgaggcgagaaggaaatgttttactcgtttcataatcagttatttttagagtgagacatccggacaacacgtatgcctgtccacgatttattgttgtttagcatgtgattgagaggttcgtcgctgacaactacttttcccaatgtagaagaagcgtgcagcaggtgcagttttccctctttatattctgctattcccacatgagcaatgtccagtccgggcatcttcgttgtaatagcaataatgtctccattcatgatccagggcaatccggcttccggcagttcgcttttcggcaaccaatgtacgacttttccggagattgctttttcatattcggccatttgtcgtacattttccggcgaatcagccaattttttatattgcttgggatgggtagacatatacgaaagagagattttctgggtatgcgcactgtttttggcagtaatgtcggtgaggaatccgtggcggattccgttctctatccattcggaagtataatgcaaccgggaaggataaccgttgatgatgccgtcccgataacgtattttttgcagattgtcggcaaaggaagagccgagtgcctgtgccaacgtgtattctacgaaagtgaggcaatctacggcatcagtccggatcactaatgattcttctccgtcttgatctaatgtgttagccacgtatttagttcccaggtaagatttcccgattcgtaacatgggttcggggttttccgggaatacaacgccgtcgcgcaaccatttctccaattcctgtgtccattgttgcttatatctaaaatgatcctgaaatccccagccatgtcctccggtaggataaacatggagagttgccggaaccttgtttttctgtaaagcaaggtaatagtttactccgtggtaaggtgctacggaagggtcgtcggaggtaagagcgataaatgcttgtggagtatcgggcgttacttgcaattcggcggaaaacttctgtatttgttccattgttggatttttgcctagcaatgcagttcttgtatttccacgggtgacttgcatcatcgtaaccaccggataaagtaatatctgaaagtccggacgtgtttccgaattgtagtgagtggcgagtgtagcagttaaatgtcctcccgcagaggctcccattaatcctaccttgtaagggtcgacattccattctttggcatgttggcgtaccatgcgaatggcttgttcggcgtctgatacggggacttcccaatgtccgttcggcatccggtattttaatactatataggtaataccttgtccgcagaaccagggagccatatcatacccctctccatccatacccagtccacgatacccgcctccgggacacatgataatagccattccattcggcttttccgggtggtagaccgtcagggtgggatgcgtgacattcgtgacaaaatgaggacgcgtttcctgctcctctccggttagtccactggagttgggagcaccgtcgggccacaaaggtagctcgacgggctgctgcgcaaatgatatggcagttacaagtgatactataatggataatagtctcctcataatgatttatttaactttcattgaagcctttataaagtaaagaatcagtaaggcatacgctcctaatgccaacacttctgaccaagtattgttcaaccatgcctcattaaccagattgattccaccaaagcgcatcgcggcactgattactcccatcaatgcacctccggcaatgaaaccggatgccagtaaagttcctttttcacctctttccgtattcagagatgcatctttgctacgagttgtaacaaaccaattcactgctccacccactaccagcggcacattcagttccaatggaataaacatacccaatgcgaaagctaatgcaggaattttacaaagagtcagaataatagctaagacagccccaataccatataacaaccagggtgcacctacaccactcatcagtggttcgatcacggccgccatcgcatttgcttgcggagcagccaatgcgccacttgtaaatccgtatgtcttattcaggataatcattacaccgcctactgttgcagccgatacgattgttcccaagaacttccatgtttcctgtttggcaggcgtacttccgagccagtaaccaatcttcaagtcggtgataaaacctcctgccatcgacaatgcggtacatactacaccacccataaccaatgcggcaaccatgcccgaaggacctttcagtccgacagctaccatcactacggaagccaaaatcagtgtcatcaatgtcattcccgaaaccggattagtaccaacaatcgcaatggcattagctgctactgtggtgaacaggaaagagatgccggcaaccaatacaatggctaccaatgtatgcaacagattcccttgcatgacatcaaggtagaagaataatacgattaatatcagtgtgatgatggaaccgatagcgataatcttcatggaaagatcccgttgggtacggataatgctcttctctacattccctttaccgcccatctctttggctgccagcccgacagcgctcttgatgatactccaggaacggataataccgatcacacctgccatagcgataccgccgataccgatgctcttggcataatatttgaatatttcttccgggctcatcatacctacggtagaggtgatttccggattccatgcattcagtacactgtcaccccagatagcagacattcccggaatgataatccaccacacagccagtgaaccggcacaaatgatggaagcatatttcagtccgacgatatatcccaaaccaagcacagcggcaccggtgtttaccttgaataccaattttgccttttctgccagcatttctccggcactgcaaacacgggtagtaaaattctcgttccaccatccgaatgtcgctacgatgaagtcatataatccgccgatcatacctgccatcaataatggtttggcctggctgccgcctttttctccggagatcaacacctgtgtagtagctgttgcttccgggaaaggatattttccatgcatgtcgctgacgaagtatttacggaaagggatcaggaatagaatacccaatacgccacccaataaagagctgatgaatacctgcatgaaggtaaccgtcatctcgggatatttagcttggagaatataaagagcggggagggtgaagatcgctccggcaacgattactccggaacaagctccgatagactggataatcacattttcgcccaacgcattttttcttttggcagctccggaaactcctacggcaatgatcgcaattggaatagctgcttcaaatacctgtccgaccttcaaccccagataggcagcggcggctgaaaaaaggattgccatggcaataccccatgctactgaccagatattaacttccggataatttttagagggacccatcaacgggttgtacacttccccaggtttcaactctctgaacgcattctcgggtaacccggtgaatttgtcttcttcttgtttcatagtttttataatttgctaatgtgttaatttacatttccgtcctcaaagtaaacaaaaaaaaaggagaaccgaaagattctcctttatgtaatagtctattttttcctactttgcatcttttgccgtcatatcgccttcgatatacaatcttaccatctctgttttggcgttggtacgcaaggtgattgattttttgaaatgtcccggatatttgcctgttccgttataagtcaccttgattgttccctttttacccggcatgatgggttcctttgtatattcgggtactgtacatccgcaagaggctacagcctgatggatcaccagcggggcatcgccgatattagtaaaggtaaatgtgcaactgacaaccgggctgttttcagaaaacttaccgaaatcgtgagttgttttgtcaaacttgatatctgcatttgtttgtgcaaatgcaaagcttacgcccattactaacagggtcattaaaaaaagtatctttttcatttttccttctctttttgattacaaacgacaaagataatgcttttcccctaaaatatactttatggagtgcgaaatagtattaaacgattctcttttgctattttgagagttggaatccgagcatcattccatcgtaattttcggccagtgaactaactgttttcagtgcggtactgctgcttttgctgccgatgaaagccattaatttcaacagtttgtccgagttgaacagtaactccagtgaactggaactgcaatttactttagcgtgcagattcagaagtttcaaatacttcaaatcaacttgtttggttgaagcattgtaggagtaagtgcctttcaatgttttcttgcccaccgtgctggtgaaagtactgtcggcattgaaagtgaaactcatttggccgtctttaatacctattttgcttaattgttcgttcagcttattttcagccatagtggctgcggcagctccgcctgctttcattagtaagttatccgattcgaactctacggccgaacctttgtagttccatgttccggtcatgtcgatagattcggtggttccggtgatggcattcactacttttgaaatgttgtccttatttaataagtcggaccatgattgcgcctggctgttagtcgccatcagcataaatactgccataaaggcaatagataaaaaactctttttcattttcattcttctttcatttaacattgagatccttgtttatgttttctatgtagttgagtatatcaatacgtcctgtgcggtcttccgaggaagatacgaagtgaggagggagctcttcccattgtttactcaactcacgtaaataggcattgatattcatttttaaacgtccacctttgagtttatcggctttggtaaagatgatagagaaggggataccgttctcgcccagccattccataaactcaaggtctattttttgaggttccagccggctgtctatcaggacaaagaggttggtcatttgctcccgttccaaaatataatcttcgattatggtgcgtatctggtctttccctttttgtccgcgtcgggcatagccatatcccggaaggtcgacgagataccaattcttattgataaggaagtggttgattaacatcgtttttcccggagtagaggaggtcatggccagacctttacgactggtcaacatattgataagacttgatttacccacattcgaacggcctataaaggcatattccgggaaaataccggctgggcatttcttcacgtccgtattgctaatcacaaattcagcacttgttatttccattttcttgtcatttatttctttgtaaaatcgtttataataaacttgttcattgtttataataaactattgcgcagtttataataaactctgccattatttattataaacttcggagtacctgttttcatggtactttcagcgttttcccttttttagacatacaaattaaccccgcaaaggtaagcgttccatttaacattagcaattcataaccgaatttatatccggtttctttttcaatccaccagtcggcaagatagcagatcagtggtgaaaggatggctatgagaggaacccaccggtcgttcgtttgcctgcgtgtaaaaagtccgaaagcaaacattccaagcagggggccgtatgtgtaggaggcgatgatatatatggcgtcaataacgctcttattattaagtatttctaccaggcagatgaagaatgccaataagactgataacgataaatgcactttgcttcttttgcgacgtgccgtttcttctgtgtctttttccgtattcagcaggtctacgcatacactggttgtcatggctgtcagggcggaatccgagttgctgaaagctgctgcgataataccgattgtaaaaagtaccaatacggattgtcccagataaccttgggctgcaaacatgggtagtatatcatcattcatggctggcagttcgaggtgcatctgtcccgctagcgctattaatagaattcccaagcatagaaaaaggaaatttagcggaatgaatgagaaaccgtagcagtacatgtttttttgtgcttcctggaggttccggcaagaaagattcttttgcatcatatcctgatccagtccggtcattacgatgacgatgaagataccactgaagaactgtttgaagaagttctgtcgggatacccagtcgtcaaatacaaaaatacggctgtgttcgctgttttggattgtttgcacaatgccgctgaagttaaggtctaatctttggatcgtaaaatagatgataaaaatcagagcggcaatcaggcaaaatgtttgtaaggtatctgtccacacaatggtctttattccgcttttatgagtatatatccataccaatgcaaccgaaccgacagcaatcagccaaaagggaacgtgcatttcctgaaatacatacgtatggagaatgaggcataccagataaagtttggctgcggttcccaacatgcgtgacagcagaaagaaaaaggaaccggtgcgataggcacgcatcccgatgcgggtgccgagatatccgtagatacttgtcagattcaacttataatataaaggaagtaagatatgggctacggccatgtatccgaagaaaaatccgagtaccgtttgcatatacgtcatatccattccgcgcaccattcccggtacagagacgaaagtgactccggagatagaggcgccaatcattccaaaagagactatataccaaggtgattggttctctcccttgaagaacgctgcattcgatccgcccttacgtccggtgatacgggctattagtaataataccgcgaagtagcaaagaatagtgactagtatcatcataacagatgcaaaggtagcaatttttgtaggtattaaaaacaataatctgtatctttgcaaggttttatcgatagaacagcaaatattatctatgaaccaacaatatccttctatactgcttgaaaaggcagtcggcgaattttccaaacttccgggtatcgggcgtaagacggctatgaggcttgttctgcatctgctccgtcaggatacggctacggtggaagctttcggaaattctatcataacgttgaaacgtgaggtgaaatactgcaaagtgtgtcataatatatccgatactgaaacttgccagatttgcgctaatccgcaacgggatgtttccactgtctgtgtggtggaaaatatccgtgatgtaatggcggtggaagcaacccagcagtatcgcgggctttatcacgttttgggtggggttatttctccaatggacggagtcggaccgagtgaccttcaaattgaaagcctggtgcagcgggtggctgaaggtggaatcaaagaagttattctggcattgagcactacgatggagggggatactaccaacttctatatctatcgcaagctggataaactaggggttaaactaagtgtgatagcccgtggcatatcggttggtgatgaacttgaatatgccgatgaagtaactttaggacgcagtattgtgaaccggacgctttttaccggaactgtataatcattattaatcatttaagaacgaacatggaagaacagataaaacgagctgtcagaaatttgaatatcagttatgttttcttttgggtgctcccggcatttttgcttggggcaggagaatttgaactttttcccgtaggaggtttggtagataacgcatcagctacctattattttgagacggtcggcattttgctcactgctttgtgtgtgcctctttctctcaaattatttagcttggtgcttaagaaaaagatagatcacatgactatcacgcttgccttgaagcgatatgtgcaatggaacattgttcgcttgggagtgcttgaagtagctattgtagtgaaccttttgtgttactacctgacgttgagcagtacgggtaacctctgtatgctgattggcctcacggcgtcacttttctgcctgcccagtgagaagagattgcgtaacgaacttcacattgcaaaagaagaaaagctatgagacagtctttcttgatgaacgagcgtatctatcttcgtgcggtagaaccggaagatatggacattatgtacgagatggaaaatgacccttcaatgtgggatattagtaattttacggttccttattcccgttatgtgcttcgtcaatacatcgaaggctcacagtgcgatgtgtttgccgataagcaattgcggctgatgattgtacgcaaatctgaccagtgtatactcggcacaattgatataacagattttgtaccccttcattcgcggggagaagtagggattgccgtccataaggattatcggcaacgaggttatgctactgatgcattgaaattgctttgtgaatatgcttttgattttctgtctttaagtcaactctatgcacatgtcatgacggataatgaagtatgtgtaaaactgttcacctcttgtggtttcgttcaatgcggattattaaaaaactggttgcaggtggagggttgttacaaagatgcattgcttctccaatgtttgaatcctaagaaatgagaaattaattgagagtaggcacttgtgggaaacgtgaccacgtttcatacttgctgcctaacttctctaaagctttccgccacatatctttaatattgtttttcatcagatatgatttctcttcctcggacaccaaccaagtgttttctctgatttcgttgctcaactgttcgctatcccaaccggaatatcccaagaagaaacgaatgcattcactgattttattcccttgtaatatatatttctttatttcatcaaaatctccattcagataaagccctttactgatagaaatggatccggggatatcagataatgtgtggagataaaatagggtatcagtggcaataggtccacctttgtatagaggaatctcatccaggtatttaaattccatgatgatatcgttaaggaacaatggcagttgcttgttgataaccaatcccatacttccttcatccgtatgatcgaccagtaaaattacggatctgccaaacgttgcgtcacgtagaaaaggttctgatattaaaatccttcctctcgatggcaacacattattcgattgaatcttaaatatgtcagagtcgatattcatgccactaaagtaagaaaaaaaacggaataacaatcgttctttccgttttttttcattttaagaatggcttttatgaatatcttatgtcaaataatcaggctatcggatgattttcagcaaatagtttcattctttcatccagttgagcatattggtggtctttaatgaaagaggtacacgcgcgcaatccttcctgatggcttcctgtagttactaatgagatagcgctgactccgtagtacatcaattctttcgccagttcgccactggtcattcccggataaccgatggtgaaataaaatccgtctgcaatcggctcgcccagatcgttgtcatataccagatgaaaaccgtgacggaggaagatttcttttaatttccgtgctctttcaccgtatatcttcacttcgttaaggaaattatattgtccttcgttggcagctttcagcatggcggccatggcgaactgtgcagaatgactagttcctgaagaaagcgcataaagcacacggtgaatgaaaaccgttccgaaagttccgccaccatatcgtttggtcagtcccggatagcttcggtggtatagtttatcagagatacaacttaccccaatacgttgcccggcgtagctgaatgcttttgagccggaaatcagcaatacgtaattgtccgtataatgggcaactgatggctggaaaggaggttgatacggtttacttaaatcttggcggaagtccatggcaaaataagccaaatcctccagaacaatcacatcatacagtgttgccaattcaccgataatcctcaattcttcttctttcaggcaaatccagctgggattattgggatttgaataaatgatggctgatatatttccttttttcagatagctttccagtttctctttcagtttttctccgcggtagtcatacacatcaaatgtttcaaacttttgccccattacaaccaactgctgtttctgtaccggaaaccctggatcgataaacaaaatcgtatctttcttttcgtcacattggctgcaagtaagaaatgaagcgaatgtaccttgcatggaaccagtgacaggcacacaaccttccggacttaaatctacgttgatgaatgctttgataaagttggatgcctctttctttagttccggcaatccgttgatgtcgggatatagactggcaatgccattttgtaatgcttcaatttccgctttcacgcctacagcggaaggaggaagtcccggaacacccatttccattttgataaattcaactcccgatgctgtttctgcttttgaagcaatagctttcacttcacgaatggtagctttggaaaaatcgacaatttgaaactcattgatggtttcgtcaatcagatgtcgttcaattggtgtatttttcattctattttctattttattagtagctgcaaatgtacacgataattcttaataaacccactttttcagaaaaaagatactgaagctattgcaggtttcaaaaaaatatctacctttgcatccgcaatcgagagagatgctaaagtgaatattttggtgcgttagttcagttggttagaatacatgcctgtcacgcatggggtcacgggttcgagtcccgtacgcaccgcattaggaaataaaaaatcctctgatttactgaaaatcagaggattttttattttgaagatagcgaataatcgctatctcttttttccatcatatccccatttcacatagatggctccccatgcaaatcctgctccaaatgcagtaagaattaggttatctccttttttgaatttatcttcaaaatcccagaggcagagtgggagagtgccggcactagtgttaccgtatcgttcgatgttgaccatgaccttttcgacaggaacttccaaacgttgtgttacggcggtgataatacgttgattagcctgatgaggaattacccagtcgatgttttctttgcttagatggtttcttgcaatgatagattcacaggcatcagccatgttggatactgcatatttgaatacagtacgtccttcctgatagatataatgcatttgattatccaatgtataataagaaggagtacatatagagccacccgctttaatgtgcaaaaaaggcaatcctttaccatctgttcttaacacagcatccataatgccaaaatcttcagtagtaggttcaagcatgacagctgctccgccatcaccgaaaatcggacaagttgcccggtcggcataatttattattgacgacatcttttcagcgcctacaactaccactttcttgtaatttccagaacggataaaattggctccagtctccagtgcatataaaaaaccgctgcaaacagcttgcatgtcaaaagcaaaagctcttttcagtcccagtctttcacataaaatagaagccgtggaaggaaagcggtagtcaggggttgttgtagctacaattatcagatcaatatcatccggatttgttcgggtgcgttttattaactgtttgacagctttacgagctatgtaagaagttcccagtccttcctctttcaaaatacgtctttccttaataccaatacgccccataatccattcgtcggtagtatctaccattttggaaatctcatcattggtcaagatgtaatcgggtacatatcctccgactcctgtaattactgcgtttattttttccattcgttttatctagttttggtaaattgaataaggaggttcattcgaaaatcaaaaatgcgggcgcaaatatatggaaaagagaccgaattccaatagtagtttgtgaaactgtagcctttttaattaataaaaaggaatatttgaccaaattttgtctaaatttttagcaggcaatttttgtttaaatgaatgagttgttgtaaataattgattcataggtaattgtgaatgttgctccggtattgctaactacgaagtttgtcaaacaactcgtcattgtataaagatgacttattggttagagactatttaaattttatgcaaatcatattttcgcttcctttcttgtcttgcaggttcaagattttcttgatgacttgcaaatgtgtgttcttctaaatccatactgccatcggtaatgtatggtaatagtcagttattcatcaagaaaaatattgtatatgtgaaaatatacacagcgatatgataaccggcagaagctgcagtacgtaccagatgcagtgtaaatgctgttttacctaccgcaggacgggcggcaataacgatctcctcaccgggttgccagccgcatgtcacccggtcaaggtcggcaaatccagtagtcagtcctgtagcactgttcttgttgctggccatgcgggcctctatcaacttatagtgtcctctatgaattgtgacgtggaacagagatgttcggcagtaccacattcattttccaatcggtcgaggagggtatgggcatttgccagcgtatcgtctgtatcagttatcctgatagttgggaaaataagccactgccatctcggatagtacgtggcaaccgtgaagcagccagtcaaaagattgattatccattgtttaaaatattttagtacgccgcaaaattatgactcgtttcattggatgaaaaaaacgtttttctgatgctggtaatttaaatgtaaaataagtatgaatatttttaaataaaaatctaattatttaaacaatcttttctatatttgcattcgaaattagattttatatggcagttttgtcgattaataatcagtaatatcaaaccatttatatataactaaattttataatgttgaaaggaatagaaataataaaagatcgtttacaacgaaagcgaaaacagtacatccatcagggagagaaaatagaacaaatgaagtgtacaatgcaaaacaccggtgaggaaattgagcaactggaatatgtgcttaatgagatggagcatatagcggatgtaaatcgtgctccacgagtgattccaaatgctagggtggaggaggtgtttgcatatctctgccgggtgtttgagtttttgcagcaccgtttaaagctgcatttcaaatataaattggcatgcgaagtcatctttgcctactatcagtttaaaagtcggttgcatactcctggacgggaatatttaagctttgcaactatactgacttactttaaacgtgaaagaggaatggcgtatgggtgatttcaaaaatatcgaaatatagagataatagtgtgaaaaacaaatgttttaggaacagaaatgacgaatttgatattttttccttatttttgtgtgtccatttttgaatgatatgatacagataatacgattaaaaggaaaagacaaacacttatatcggcttttagcgccgatggtgatggatcccgaagtgatacgcgcaaacaataattaccctttcaagacgggcgaagagtatgtgtggttcattgcgattgaagataaagaagtggtgggcttcgtccccgtggaacagaaaagccggaagaaagctgtaatcaataattattatgtgaaggcagaaggcaccgtacgggaggaaatcctgtcacatctgttgcccgctatcgttgcggaatttaggcccgagagttggttgctcaattcggtcacactggtacaagataaagaaacatttgaaaagtttgaatttgtatcgatggacaagaaatggacacggtatgtaaaaatgtatagataacttatgacgaaaaagaaaatagcaggcacaaagaatgtatatgaattagcacaagaacgactgaaagttatatttaatgaatttgataatatatatgtgtcattctccggaggtaaagacagcggggtactgctgaatatgtgtatcgattatatccggaagaataacctgaaggtacgtttgggagtttttcacatggattatgagatccagtataaaatgaccattgactatgtagaccggatgctggaggccaataaggatattttggatgtataccgggtatgcatccctttccgtgtggctacctgcacctcgatgtatcaatctttttggcgtccgtgggaagacagcaaaaagaatatatgggttcgttccatgccgaaaaaggcaatgaccaaagaagattttcctttttataatacaaccatgtgggattatgaatttcagatgcgttttgcgcaatggatacataataaaaatgatgcagtgcgcacttgttgtctgatcgggattcgtacacaggaaagtttcaatcggtggagatgtatctatatgagccgtaaattccagatgtatcataaatataaatggacttcaaaagtagggaacgatatttataatgcctaccctatttatgactggaaaacaacggatgtatggactgccaatggaaaattccagtgggattataatgttttatacgatctttattatcgtgccggagtcaatctggagcgtcagcgtgtagcaagtccctttattaatgaggcacaagagagtttgcagctttaccgggtgcttgatcctaatacctggggtaaaatggtgggaagggtgaacggtgtgaactttaccggtatgtatggtggtactcatgcaatgggatggcaatcggtgaaacttcccgaaggatatacatggcgcgagtttatgtattttttgttgtctactctgccggagcgggcgaggaagaattatctacggaaactttcagtgagcgtgaatttctggcggacaaaaggcggatgcctgagtgatgccaccatccaaaagctgattgatgcgaaagtaccaattatcgttatggacaacagtaactacaaaacgttgaaaaaaccggtacgtatggaatatcaggatgatatcgacattccggaattcaaagaaatacccacgtataagcgaatgtgcgtttgtattcttaagaatgaccatgcctgcaaatatatgggattctcacctacaaaggaggagatgagtaagagaagtcaaattatggaacaatatagaatcatagtatcatgagtgtagataaaagccctgtttacgaggtaaaagcggtgcccgtagaaaaagtatatgcgaacgattataatccgaatgtcgttgcaccgcctgaaatgaagttgctggaactttctatttgggaagatggctttacgatgccatgtgtatgttactacaataaagatgaagaccgttatatcctggtggatggttaccatcgctatacggtattgaagacttcccaacgaatctataagcgtgaaaacggtttgttgccgattgtggtgatagacaaagacttgtctaaccgtatgagttcaacaatccggcacaaccgtgcgcgtggaatgcataacattgaattgatgtgcaacattgttgcggagcttgataaggcaggtatgtccgatcaatggataatgaaaaatattggtatggatcgtgatgaattgttacgtctgaaacaaatttcaggacttgctgatctgtttgctaatcgcgaattcagtattcctgatgaggtggcacctacggaaactgagcgtaaaaccttataatctgatagttatatatacagaaattgagtattttgtcatttaggcacaaattatacaagttattagcttattttgttgtataaaatagttagttcttttgtctaatttgtgcctaagttgtgtctaaatgacacggaaaactataacttccctctattgtccaagtttttatgaaagaaacttgggaattttaaaatgttcgcatatcgaaagaaatgaggatattgaatatttttgttgtgaatttcgtaaccttgttgttcgctacctacataattagtccctttattctaaattgattctctgtaacagaaatgaatacaattttgtatctcctttaatattccgaaatttgcaatatgagatttggacaaaaatattgtcctgagagaaaagcaaaaagagaaatatataagaagtagaggaaagtatattagagaattaatgagagaaataacaaaacttacaatcagttttttatatttgatttttttattatctgtggtgtgtgtgcaggggtcgaatgtgaccggcactctctttcaattaacaccgaaagtgacaacttgtgcggatatatatgccaagttgttgattatgccgttgagcaatccttggcttggctctctctcttatagtgacactcaagaatcaatctccatgaattatattatgtatgagtccggcattcagaacaatacctgtctgcacatcaagggacttggtctggtaataacatcggtaacagatgggggctgactggttgatgtagtatgaagaaggacaaagagaaacaggtgacaggatgatgtgtatctaacattaaaaacaggaaatttggaaaaagaagttcatattagacaaaggaaagttgttcctgctgcgggaagtacgcttcagctcatgcctactgaaaattcaaattcggaggtatatgaaatcaattatttctgccttacgggcgaagtggatgaaagtgctaaaaattggatccgtctgtattcttccgtaatgccggaggaacatacaggagaagaacgcattatcgttgaagacggtaagatatatattaaggtattgcccaatatagaggcggattccagaaacggaatcgtacatctcacaacaatggcgtcttccgttaaaacgggcatcagtaatgtgcaacgcataaaaatagatgttactcaattggggcaataaataacagtaaatgtgatataaatgaagaaagttgctatactcatattattcatgctcggatgtgctatttccgagggttatgcccagaaggttgcgttgaaaagcaatctgctgtatgacgctaccactaccatgaatttggggttggagatcggactggtgcgtaaatggacgctggacattccggtcaattataatccgtggaaactttccgacggcaaacgcctccgtcattgggggatacaacccgaagttcgttactggttttgtgagagttttcgccgtatgtttatcggaatgcacggacattatgccgatttcaatgtaggagggtggcccgactggtcttttatcagtgacaatatgcagcatacgcgttatcagggatatctttatggcggtggcttttccgtaggatattcgtggattctgaaaaaacgctggagtatagaaacgtctgtcggagtgggatatgcgcacattgtatatgacaagtatccttgcgctacctgtggtacgagattgaaggaaagcagcaaaaattatttcggacctaccaaagcaagtgtgtcacttatttatgtaattaaataataaggagtatgataataagaaatataggtttccttgtgtgtatgttggtggtttgcagcctgaatataaacacagctatggctcaatcccgctcttacgaaggtggcattaccgtgaatccggtgcggttggaacagaaaggtgattttattcatgtcgatatagattttgttttgaataatgtgaaagtgaaatctgcccggggaatggatttaattccgcggctggtgacttccggacgcactctgaatcttccgaaagtttctattaaaggtcgtgacgagtatttggcgtatgagcgtgggcttgcgttgatgagcgccaaggagaagagaagctatgagaagccgtatatagtggaaaaagccggaaaactaagaaatgatacgattcggtatcaatatctggttccgttcgaatcatggatgaaggatgcgcgtctggacatgcagcgtgacgaatgtggttgcggtgaaacggcattaatgaacatcgaggaatttggcaaagtgacgttggaacgtgtatggacgccttatgtagtggttcctcagtttgcttatctgcaaccgaaagcggaagaaatcaaacaacgggatattcaagtagaatgttttctggatttcgaggtgaataaagtcaatattcgtcccgaatacatgaataaccctcaggaactggctaaaatccgcaagatgatcgatgagctgaagtccgatccgaatgtgaaagtgaaccgtctggatattatcggttatgcgtctccggaaggaacattggcagcgaacaaacgtctgtctgaaggacgtgccatggcgctccgggattatctggcatacagatacgattttccgagaaaccaatactacattgtctttggaggtgaaaactgggacggactggagaaggcgcttgaaacaatcgaattggaatataaagacgaagtgctggatattatcaggaacatacctattgaaaaaggaagagaaacaaaactgatgcaacttcacggagggacgccttacggatacttgttgaagtatattttcccaagtttgcgtgtggctatctgcaaagtgaattacgaagtgagggattttagtgtggaggaagcaaaagagattatcaagacgcgtccgcagaatttgagcttgaatgaaatgtttctggtagctaatacctatccgacaggctcgcaagaatttattgatgtgttcgaaacggctgtccggatgtatccgcagagtgagattgcaaatataaatgctgctactgccgctttatcacgcaatgaattggtttcggctgaacgttatctgggcatggtgaattcgaataagaatttgccggaatataataatgctatgggaatattaatgttaatgaagggagattatgaatcatcgaagaagtatttgaagtttgcagagcagtcaggtctggatgcagctaggggcaatctggaagaattagtcaggaagaaggctaatgctgctaaaatgaaaaagaatggtaagtaaaacttactgattaagtgggaaattatataagtattaattctaatatttttttgtattatgctaaagattaaatcaattttagtttcattgctggctgttgcggcactggcaagttgttcaaatgagaatctggaggaaaatccggaggttgaagggggagcaggttatgatgtagcttacgtatcaattagtctgactaatcccaaaatgcctggttcacgtgcttctggtgaacagacggctttagaggaggaaagtgcgattaatgagctctatttgattacgttcaatgcgagtaaggtggtgactaaggatgaaaaggcaactaagtatgccacggtattgggatcaagttctttcggaacaaatagtggagttacgactccgaatactccggttaaagtggatccgaatacaaagtatttgcttgttattgccaatccaggttaccaattaaaggatcgcttggataatctttcagcgggtgcaacctatgctaccatcaatggaatgattacagttcctgaaaacaatactaagcccaacaatgcttatctggtagaggaggttgtacactccaatggttgtgcaatgattaatgtcggattctacgatgattccgattcagatccatccaatcatgcatgggaggatgaatgtctgcttgatgtatcggacaagattgttttggtcagcgactataaatcggaagcgcaagctcagaatgcggcgaaaagtaatccggccactcttgagatagaacgccttgctgcaaaattggaggttatgattggcagtccattagcagttggaccttttgaagatggaacaaatgcaagtctaggacagtttgattttggaaattggactatagattactacaactccctgttctttccttttgcaaaggagactaccacagcatcgtctcatactaccggattttacaaaagtaacttctatacagtcgacccgaactttacgactgcgggtggaaccgaatatcttacaggcattattaagaatacactcgatgctgcaactcgcgaacctaaggtggaatgggttgctgaaagtgcgactgtaggtgataattacaaatactgtatcgagaatacgatggtcgcaggatatcagaagttcggtgcggctacgcgtctggtacttaagggacagtatgcaccttggaagtctggtgaatttactttaggaaatgactggtatcgtcttcctaacggaactaactctgtaaacttcaagagttttgccgacttgctggctgcttatacgcctgccaaagctaaagaaacagcctcagaccctatgaccgcccaggagaaacttttagtttcggcatgcgaactgttctatactcagataaaatctgaacttaccactaatgatccgggtgattttgcatctcttacgcaggctattcttgacgacaacaacattcagaatggtggtgaactgtgtaaaaaagaaggttgcatttattggtatccaaagagtctcaactattactactatgagattcgtcatgacaatgcagccaactcttacatggagtatgggaaatacggtgtagtacgtaataactattatacgcttacgctgacaaaggtgaatggtaacggtacaccgtggtatcctggtggtggtcccgaagatccggatgaagaagaagatatcgataagaaaggtgcctatctccattttgagattaaagttgctccgtggatatactggactacaaatttcgaaatctaaataaattctttactttcaaagaaaacagggcagtgcggactgcctgccctgtacttttaaaatagatattccgtacggaacagaccgccgaaaaaagtaaaaacaagccggtgacaggcttcccaaaaacagcactgaaatataccggcgcatccgagatgcaatgaaatgcaaagcgcgccccaaaaagaggaaataaccggaggtcacaaaatagaggtctctgacaatataaaatggcaaaccgatagggttgccccctaaaagaaaagatatgttcggaaaaactaaatcgctgttccttatcgttgcttcgatgctatgtatggcttcgtgcgacagtataagcgaagacctgccacggtgcgagctttggttggaatttgtattcgactacaatatggaatatgcggatgcatttaatccgcaggttaaatcggtggatgtacttgtgttcgatagcgatgataaattgcttttcaccaaaagtgccaaggttgctgcgttggttggtggaaaccggatgtcgttgaccgacgagctcgatttcggaagttataaagtactgaccgtcggaagtctgtctgacagattccggctttcggacaatgcaggtaataaactggtgccaggaacaaccaccctccaacaagtcattgtatccctgaagcgggagatgggtgttgttaatttcgaatttcagcatctttacttcggagaagttgtggaagtggaccacctgccatccaataccaaccataaaatttatccggtgaacctgatacgtgacaccaatcggtttaatctcgcgttaatgggatatgaggaaaataaagtggatggcacacaatatacatttgaaattcaggcaccggaaaatgcggtttattcctgggaaaacgaacccacaggacaagggccggttacttatgtgccttactatacaggtccgggtgaaatatccgatgtggttatgtctgcacgcctgaatacgatgcgtttgctcaacaggagcggatgggattataaatttattataagggatgcgaataccgaagccgaagtctggagctacaatctgatgacactattgagcattgcccggccggtttcccgttacgacggaacggaacttccctttcaggagtatcttgacaggcagagtgaatggaacctgatatttacagttgttgaaaaacccggaggaggattccttcaaattggtattgtcgtggggacctggattcattggctccacgggatggaagtttaagaatgagaaaaaagctattacatatcatttatctggcatccaccatccttttgttctcatgtagtagagaagctgatgtggcttatgagttgcctgcccatactaccagggcgcaacttagcatcgacttggtgaacaatggggatgtggaacaacaggagaagataaactccatgcggtttatcgtattcggcagtacgcccggtggcgtgaggctggatgtgaatgaacacatcctgttgagcactccggagacagctactgatatagatgcgcaacttctcgaagtgacttccagcaatgatattctggtcgtagttattgccaacgaaccgcagagtctcacaagccaacttgacggtatagctaatcttttgacattacaagagatgatttacgacatctccagcatactgaataatgacgggcagattatttcggcgaccggaatgcctatgacaggagtgatccgggatatatccatagcacccgatgaaaccaaaacagtgcaaatggtgatcgaacgtgccgtagcccgggtagatgtctttatcgaagctatagacggcggggcagtgaccggatatactgccggaagcaccagtgtcaccttgcataatttttcccatgatagctatttcgtgatgggaaatgtgggcaacggcacgcgtgataacgccgactcttcaaaaaactacggaaaggtgaaggaagacgtgtcggaaagcaatttattaacgcatagctggacggctgcgactacagaaacttgggcatattcatcggctcccggagctgaaaaccggaagttgctttgctcgttctacacagccgaacgcctattcaagtcggattattccgaccgactgtctatcagtatgactaatgttccgaaagggccttcggacgtcaccggaataaccgggaaagtaattgaaagcgtaacaaaggttgacggcacaggtagtccgacagcgcaaccttttacggagatccgtcggaacaacgtgtatcaggtaacggcacgcgtaggaaaaataggtattcagatactgacgataagcgtagaagattggggtgaaagacaagacattgatttggatatggacttgtaatatctttcgctgattgtttttaatttcggaaaagaagtaagatgataaagactataaataatattaggatgattatggcaatggctgtcctttcggctgtcctcttttcgtgtgtcagagaagagatgacgtgtgataaggaattaattgttgtgcaacgtattggagaaggcggctatgtctacactcgtggtacggtaatctcttcgaataccgatctgaaagaagagactttcggtctttacggttcactgactcccaatgcttctgttccccaaccatacttcaatgcaagtgctacggttaacgccgacctgacagccaccatctcgccgttgcaatattggcccggattgttgaatgcgagcatgaagttcttctcctggtatccgtacagtgatgcgaatgcgcctactgcgagtttcactgatcccggagaaatggtgctgaattatacagcgaatgaatccgccgccaatcatgtcgatgtattggcggctatatcgggccctatatgggttgaaggtgtgaatatacacttctaccacacattgaccaaggttacctttacattcaagaaagtagctcctgtaccgaatgaggtgactatcgagaaaatagaattccagaatgtgggaaaaagcggtaaccttgcgatgactgaaattccgaccaccacgacgaaaaacggcaaaccgaagtttgtctggagcgatgtcgccaccgggaaggtcgcttctactcccaccggtaacaaaacagttactgaagatgccaccttgataggtgatacattcctcatgttgccgactgacgctttctccgcaaccgccaaaatcgttgttaccaccaactttggcgatcgggaattcctgttcagtgatattctcgccaagaatccgcattcttgggaatcgggcgagtacatcaactacaatcttacgatatccaacgaaacctatcagctttcagctaccccgcttgaatggacggaaagccaggtgaatgtaattttcgataaacagtattatctcaaattatcgcagaccaaggtacagacggctggtgatggggtcactgtcaatatagaagtgaaaacgaattatgatgctaatccggatacaggatttctgccgggggcgtcattaaacaaaagtaccatggatacgtggccgacagttaatatgactcagatatccctttcggaaggagtgtatacgtataatatccaggttgtgatgcccaaatttaattcaggaaccggaactaagcgggaaacaggcttttatatcaatgccggtaatttgcggcaccatgtactgttgagtcagtggagagaagacggagagtggctgacctcgaacgtagagttggacagcaacgataatggaaccggaaatatgcgacgtcgcaagattgtctttacttcgggcaatccgggaatatgggagtggaagataacccagatacaagatccggataaaattctgcttaacagtgagacaatgctcgaaacaagtggcgtgagtggtgatgcggtttacttctactttagagccgatgctgtgtccggtgatacggctagactcatactaaccaatacgaatggtgataatctgccaataacggtgacattgaccgcaccataatgacgaatatgcaatatcaaagtttaaggaaaggaaatagaaatatgcaatataaggtttcaataaaaagaaagtgctatcttttgtctgttctgttgatgacggtatggcttaccggatgcgtacaggaagaatttgagtcgacgccttctccggcaggaaatggcattcgttttacattaacggttcccgatgtaaacctcccgtccgtatcttcgcgtacgatgaccggaacgggaacagcaaagaaagaagacgaaatagaaacggtggatattcttgtttttgatatgtcaaaaacgccggcagtatttctggaatgggtcagcgctacaggagtcactcaggacttggctgacaattccactgtgagtttctctgctgtgctttctcccactaccgcatctacctgcatcgtggttgtggcaaataaggaacttgataatattgtgtcgggcttcacgaagggagcgaccaccaaggttgaggcaatggaaaagatgctccacacccagaccggcaaatggttggcagatggctcgacaactggtgggtatacgcggattccgatgtacggggagaaggtaataagcaaaatcactccttcgatggatccgataaccggcataaatatgaaacgtatgctggcgcgtattgatatccgtaataacagtgccacttcgaatttcacggtcgaagaggtttacctggccaattacaataccaccggatatattgctccggcatggaacacgaacgggcaggttactgacccggttccggatactccggttctccccgcgggtagtggtaaaatgacggaagaaggggatgcaatcctttattccgtaaatggtaacacaccctacgatggggagatttatacatttgaatccctggcggcagaggatgccggtggtgcgggagcagacggagaagcgagccgtaaggatgctacttgcctgattgtgaaaggaaggatcggtacgggtgaatcgacattttaccgggtggattttaccaaaaacggaaatacaggagaacaagtggaatatttgcctttgaagcgaaaccataaatacatcattaccattacccaagcattgggaaccggttataaaagttttagcgaggcgctggcatcatatacagtcatgtccaacttgaaattctggctgatacactatgatcgtgataaggtcaaagatgtggtctacaatgggcaatatatgcttggagtgggtgaatcggagctcgctgttactcaataccagaataatagttatgccatagacgtttttactgacagtcccggaggctggaaggccaccattactgcagggaacgactggctcaaatttgaaggtggagctgatgcggcatcgggcgttgcgaacgatgatacccaactcaaattgaagattccatattttaataatgaaaatattggcgttgggcgtaaggctactgttacgttgacggcaggtcgcctgactcacaatattgaagtgacacagtatacaatagatccgggaattatcaaatttgtcgatgcatacggaaatgtgttggagagaggtcttttttttccaattcgaaatcctgatggcgacgaactccctcttgaaccgcagacggtgtatgtcatgttttccgtggataggatagaaggtaagctttatggcactggtggtgtcaatatggtccaatataatgccggcggtttgattccgcaattagacaggacgaatgcgataccgttcagtgaaagggtgcaggcgtttactatacagcctaatccgcgaagagcaggcgatggtactgttgaagatggtgcaggctggtggtggcgttgggactttatgttgttcgacctgtacgataaggaaggataccttactcaagtacaattccccatcaatcagggggagctggagttttcactccgatatctttccactacagtcaatagtcgtacttataaagtcaatctgggtgcggaacaatacttgcaattgtttgtcaataacaattgggaaattatggatattgaggaattgaatataacgaacgatgatggcaccggactgattcggaccgattcggataatgatgtaattataggtagaaagaatgcggacgacaagatgtatcttgagtctatcataggctatgatgacggcaagggaaatgatgtggttggtcatggatacgatttcaggctgaagcttcaccccggcaagtggaaagaaggaaaaagcggaacgataagaatcacgttcagaaatgtaatgcataccgtggcagatgaagaattcccgttttatcgtacgattgaccttcagatggtgtccgaaaccaaatcttacacaactgccggggaacctcttttctatctttattcgcttcggtttgataataggagatattataacggaactaaccaaagtgtggggcgattggaaaatgtagccgatgcggaggatatctgtaggaatataggcgatggttggcgtctgcctactgctagtgaactgttgctgtcatttgtctatgaaaatgctttgggtggtaatgcgattaacagtaattatcatgacggtcagaatatatatgggtggtatcaaaactggacaggtaactactggtcttcatcatactatgaggctaaaggctctacaacacgttttgggatggaaatgtcggcaggttatccggattccgcacctgttagtaataataattattttcgttgcgtaagggataatacaaatagcggaaagaagtacccttatttgatggtagaatcctcgggggtcactattgtctctcgcgatgccagtggaggaacagatcctttggtgttatttgcttcaggtgaaactccggatacaagtgtcgcaatgaataaggttgctcctaagtttcagattgaaaattccagtagtaatggtaaaacttgggcggaagcaaaagcggcatgcgaaagcaaagggagtggctggcgtctacctactcagcgtgagatgtatttagtacttagtatgggaggggctgtaaccaatatcgaaaaccaaggtttcggtgactcgactacttggacagggaacggattcgagaagattagtactgtgcactggacattgacttcacgcgatagcaactattggctggtcggacataataatggtgaattcggcgcatgggctacggtagagtccacaacttgggcttggtatcgttgtgtgcgcacaatagaataaaagctaaaagaactgtatcagaatgttgtttgtcttcattctgatacagctcgtctattaaatccttttctttttattcctagaatccacaatgtttagtgtgtttccctttgtttacaacgtattgataacttccaactgcttttgcaagaaagcaatacgctgtgcttctccactttccgaaaccagaatagagtggcgcttcaacgattgaatccaattgcgttgcatctggcagatatatgagctttgcgaatccatcgagttgatagaatatacccgcagcagactgacttggtaatcatgtttctcgatatagctgtaagtggcttcgaaactgatattggacagatagaaagacactttcttgttttcgctgaactctccctttatggacagatgttctaccacgccaagtaactgaagaagttcttctttcaaatgcatgacatcgtccttgtttatcagattcaggctggcaaagtacttgatctctttcacaaaagaataaaagatatttgtgtcccagatgaaaaacgtttttggacactgtcttatactttcactcaacttcttatgcacattgacgatccgttcatccacagacatgtcttccaaagaatgtggcgtctttatatctccattctgatacatccatcggcaaagacggaatttagacaaattctcataggaagaataaagtgtaaagggaagggaattggatgcagtatacacctccgtcgtattatctgttttcacatagtcgaaaatttgcagataacggttgattatttcgtaataactttccagcgcactagtggcatgaagtaagttcaggtcgaaagtaactttattagatacatggctaccgacaatctggtcaatagaaataccgagtttttgagaaagcagcgctacttcgtctattgtaaaagacacctcacctctcaatctgcgatagacagcttcctttcccatgcataaaatgtcagccaaagtattggccagattcatatcttgaggaattcgctccttcattgtagatattaattcgtttagaataccatttttcattgtttgttcctttaattttaatgttaataatctttgtgatacattctatgcaaaattacgtcttgtgtttgaaagatttgtgtggaaaaacagagatgaatgtatgtgtctttttctgattgggaatcaaacggaagcggtgaggacagggaatgaaaaaaagtagataagaatcttatctactttcatttattggaactgattttttttttgaagttctaatctgcgaaaataaaattaaagagcgtcaataatttctcgctgttgcttgaagaattgaatacgctgcatttcaccgctttcggatatcaaagtggagaactttttcagaggttgaatccattctttcaaggtacagaaaatttcgttgtccatcgtggtaatggagttgatggaataaatacgtatgaggctcatttgcaggttattggtgtctacatagctatatgttgcctcgaagttgatattcgacacatagatgcgtacacgattgccatcggctgtcttgccattgatagccagttcttccagttcgtccgccaataagaataattcatttttgatttcttcttttgtttcgtcggaaatgagatggatgctggcgaagtattggatatcgttgataaggtgttggaaaatcatattatcccatatatagtctatggagtggatatgacgtgtcattgctacatagtctttctggatattgaccagtttcggtggaatatccaattcttcgaaactcttgcaatcaatatatttattctggtacatccatttgaataaacggaattttgccagaagttcatgtttcagatagagagtctggggaataatgttggcagaagttcccattacagaattcgggtcatccggcatcgtattgattagcgagacatatttttcaaggatattgtagtaactctcgaacgggtcgtcataatctacaatgtttatattaaacatggcgttcgatttgaaacttagtcctataatcttgtctagcgatatacccagttttcttgaaataagagccgactcttgtaaggtgaaaggtacttcaccgcgcaatcttctgtatactgcctcttttcctatgtatagcgtgtccattaacatatctgccagttgtcctttgagcggaagcttttccttcatcgcttctatgaggtttgcatttggattatttgtcatcataatagttctaataaataatacttttctattataaacatttgtcagtggcaagttgtttcggaaattgaaactatttaaatctgctttttttttaaatatcctctccgaaaattgtttattttaagcaaatcggttacatttgtgaccataaacaaaacgaagagacagcgtctctttagtaaacaatagaaatatttagaatgaaaagaatattggtaagtggcggagccggttttataggctctcatctctgtactcggcttataaacgaaggtcacgacgtgatatgcctggataatttttttacgggttcgaaagataatatcattcacttgatggataatcatcattttgaggtggtgaggcatgatgtcacttatccttattcggctgaagtagatgaaatttataatttggcttgtccggcatctcccattcattatcaacatgacccgattcaaactgccaaaacatctgtgatgggagccattaatatgctgggattggcaatgagactggatgccaagattctgcaagcttctacgagtgaggtatatggagatccaatcgttcatccgcaaccggaaagctattggggaaatgtgaatccggtaggttaccggtcttgctatgatgagggaaagcgttgcgcagaaacattatttatggattatcaccgtcagaataatgtgcgtgtgaagattatccgtatttttaatacgtatggtccgcgaatgttgccgaatgacggacgggttgtttctaattttattcttcaagcgttgaataatgaagatataacaatatatggtgatgggaagcagacacgcagcttccagtatattgatgatttgattgaaggaatgataagaatgatgaatacggaggacgagtttacaggtcctataaacctggggaatccgaatgaatttccggtattggaattggcggaaaggatcattagtatgaccggttcatcttcgaagattgtatttaagtctttaccggatgatgatccgaagcaacgccaaccggatattacattggctaaagagaaattgggctggcagcctactgttgaacttgaagaggggctgaagcgtatgattgaatattttaaaaatgtctgaagcataaaaaaagaaaattatgaatatggaaattaatccttctgaatataaggtccttattgtggacgatgtaatatcaaacgtccttttattaaaggtacttttgaccaacgagaaattcaaaattgtgactgccggtaatggaacacaggcgttggaacaagtgaagaaggaaaatccggatcttgtattactggatgtaatgatgccggatatcagtggctttgaggtagctcaacaaatgaaagcagaccccgaaatggctgaaattcccattatcttcctgactgctctaaatagtacggcggatatcgtaaaaggatttcaggtgggtggtaatgactttatttcaaagccattcaataaagaagaattgattattcgtgtgacgcaccagatttcgttggttgcagcgaaaagaatcattgttgcacaaacggaagagttgcgtaagacgatcatgggacgcgacaaactctattctgtgattgcacatgacttgcgttcaccaatgggatctatcaagatggtgctgaatatgctgattctgaatctgccaagcgaaacaattggtgatgagatgtatgaattgctgacaatggctaatcagacaacagaagatgtattctcattgcttgataatctgctgaaatggacgaagagccagattggtaaactgaaagtggtttatcaggatattaatatggtggaagtcgtagagggcgtaagtgaaatctttacgatggtggccagtctgaaaaatattaagatagtacaagatgtgcctgtagagaatgtggctgttcgtgctgatattgacatgattaagacggtgattcgtaatttaatcagtaatgcgattaagtttagcaatgaaggttcggaagtagtggtgtcactggcagaagaagacggtatggcaatcgtaagtgtgaaagacagtggttgcggtattgatgacgaaaatcagaagaagttgctgcataccgatactcatttcagtacctttggtacaaacaatgaagaaggttcgggactcggattgttattgtgtcaggactttgttgtcaaaaatggcggtaaactttggtttacttcaaagaagggagacgggtctacatttagtttctcaattccattgttggagaaataagataactatagataatacgactagaaataataagggcacggtttgcatgaatatgtaaatcgtgcccttatttaattggtatattctattttcggtttatcgtttgcagatagccttaaaatcgcaatacgaacattttttagtatcttctgtctgcgtaaaaggctcttcttcgctgaatatttcttctaataatgtttgcaggcgttcacggaattcatcttcaaagaaagcgaagttgtttaccggtattttcggtttacgaggttctcccatttcaataacaggcgaatagttttccgatgctgcccggtggatgtagagcagagcaggagctaccattaacgattgttgccggctcatgatagcagcatacagaaaagtctggaagatatagttcgggcgtgtttccgatggggtgaacagttgctcgatattagcaggtattttagggcttcctcctgttttgtagtcaacaatccgcagggtactttcttttgcatccatacggtcgattgtgccacccagacggagagtgaacggtccttgtcctgtttgtatagtaatctcttctgaaactttcttttccatagcgaccatttcgaaaggagtatattgaaggtcgttacgcagcaattgtttcagataggaaacaattactttggagttgataagttgtatgccgttatattccggtttttcttcgggagaaactttgaataattcttttttgaaggcttggtcaacgtagctttgtagcttcacgtcattgcgtaataagcgttcaagatcttctttctgtatcgtttttccggttgcagtcaggtcggtgtatgctaattgggcggagaggtggaaaatggttccgaatagagcggaatcaatttcagcactcacttcgtccggtgttttcaagcccgctacatagcggtagtagaatctcaaccggcaatccagataagcattaagggcggaaggagagagaaccagtgaatttggatgagtgctatcgtaagcacgatagattcgtcttagtacttcaggtgttttttctactcgtatctcttgggtactttgcggagattgtccggcttccagatactcgcgagtgatatcatgtggaccttctacaagtaattgcagcatgaagcgggattcttctccacggttgagaccgtccgaagaagtattgtagagtagcgtgatattctctgcccgttgtatcagtcgataaaagtagtaggcatacactgcatttttgtgttcgatagtggtcatgccaaatgctttccggagattatagggaataaaagaggaatctcctccggattttggaagttgtccttcgttgagagacaatataatgagattccggaagtccagattacgtgtttccaatactcccatgacttgcattccgatagcaggttctccgtggaaaggaatgttagaagatgtcagtactttggtaatcagtcgtttcagagtatcggtgcgtatatttagttctccgctttcagtcaaactgtagagacggttgattttggtatggctttgaaagagcgattctctatatagttgattgaagatatcattgtattctccttctttccgataaatggttgaaatgtttttgattaattcgatcagataatcgcatagttcttttataccattacggggagtgaagagggtagttagaaaatcatcctgtttaagttctgacggaagtggataaaaacggtttgtttgggtcagttcacgttccaggggaccggcatgggatgataattgttgggtatagggatgcttcaatatggcggatactgcctcgtaagtgaatcggtcggtatcggagcggtaaccattggtttgcagttccattacggcattgataaagctataaacaggagtttgagccaatgggaatcccatggtgatattgacattcttcacttcctgcggaatggaatgaagtacgggaagcaacagagcttcattacaaagcactacagcattttctttttccttttctacggtaatttgtgaatgatcgtttgttatcgccttaatccatccgggaaggaaacgtgcttgggcattctcggtagaagcggaaatataacgtattttcttcgattctttaaaggtgttgaaaaagctttccgggagttcgttcggaaattcctcgagattacgtttcaggaattctccggcctcatgttttttgatttgttgggtgtagaagatatcatagtcccaatagaagagtgccttgcccgcatctttcagttttctgaaaaagtcactttctactttgttcaaaacattgaacccgacaaatatgtatttgtcgtatttgagttggtcggtatcgagttgttcgatcacgttccggtagagcatgccttcgtaagcaatgcctaactctgtcaggttcgcacggtaacgatggtagatagtacctagcttgtcccaaagggaaataaatttttcttttagttcggtccgtttttcaatggagaaattctgaaaaaactgttgtatggcttcttcctgctctttgtcaaggaattcatagtcatccatcagatttttcaaatcttgtagattgctgaataatttgtcggcatcgaccatattcttatctacatcatcaaaatcactaatcaacaattcgccccagaagtagaaatcgtccaatgtttcctgactccgtgtttcctctttgaacactttataaagttcgcagaccaatcgaataggatcgccgcctttctgtacggatagtttctgaaacaggtcgctgatactcatggcagctggtgaccagatcggtttatcggattctcctgctaaatattcattgaagaacaagttagcacgtttattagggaaaacgagtaccgtacgtgacaggtcgtttcctatcttggtatataaatcatgagcgactagttggagaaatgattgcatattgattaaactatttttctgattcttgtatttattgtaatcggaacataacaggaacggtgaaataaacggcaactttagtaccatcttccaattctcccggtttccatttaggcatttgattaatgacacgtaaagcttctttgtctagataaggatctacgccgcgtacaacttttggtttgactatatttccttccttatcaacgatgaactgaataatagtacgcccctgtacaccattacctcctaatcctgcattagggtgttgaatcttttttgcaagaaataccatgagagctttctgtcctccaggaaattcgggcataacagctacttcctcataaacgtcaggatagtttatacgagtataagtgattctcaattccgggccatacatcgcactgaatgaaagcatcagattgtatgtcacttgtactgtctcatttgccaatatgccgggtgtccaacgaggaatgagagacatgacccttaatatttcagcttcaactttggggtgtatcttgcgggtaatcttagggttgataacttgtccgtcataatctatagtgaattttacatcagtgtatgtattattagcaatactatctatttctgaataacgaagattttctttcagaaattctataaatttttctgttcctccgggaaattccggtagcttttccggaccataaaagggggcttcccctttcatgtctttttcttgtatcaggctgtcagcagtaatggtccaattcattttagggcattgcagtgtttctgcgtccaatgaagtaggaggtattattgtaagtataccagttgatagtccaaacagagtgatggccttacctacacggcgttttcgttcaagctgttgctccaaatatcgaacttcagcttcgcatttggggcaagtacccaaacaatctccctgatactgacattcagaggtaatgaattcaatatcattcgcttcggctatctgccgacgaatctcttttaagattttacaggtttgttttcctcttgccatggcattaatcattaggggttttataggtgaatcggtcgaattgggtgattcccatttctttcaaaagttctatgctttggtcaatatccttctccgtattataggaagggatgagtggtgtccggataacgatttgcttggctttgtctttcccgattaaatatcgcaaattacttaagacgttttcattattctttccggtatatcgctgatagatgttattattcatatctttgatgtcgactatgtaattgtctataatagaaatcagttcttctacattctgttgcggaacattgagagaggtttcgacagtgattctccattctgggccacagagttggcggaattgcctgataaattcgctttgtaacaaaggttctccaccgccaaatgtgactcctccgcaactcgccaggaaataaagttcatctttgcgtacttcctcgtagagctggttacaatcatagctctcccaaacaccatcgggctgcaaagatgtcggattgagacaatatttgcaacgcaacggacagccatggaaagcaactaatgttgtaactccttcaccgtcaatcgttagtcgatgacgggcaatgccgatgagaggaacagctttcatactttttctattttttcttcatccacataccacaagtagccggtgatatttttatatcccatcttggtaagaagttgcatatatcctttcacttgtttgttatatttaggattttccttaccaaacttgaaatcgactacaacaacctgatcgtccttcatcattacacgatccggacgacgggtttgcagaactcctttttctttatagataatagcacattcattaaagagtgtccattttccggaataccaatcttgaatttcaggagaagaaaaagctttctttgcaacttcacgagccactttttctttctcatcatttctgataactccttcaaaaataagccgttcaatggctggatcgatatcttctgcagtttcgatgacagaaaataaagtatgtaacatacgtccgcggttgataaagcggtcgtccgaatcttcttcttcaatgccctgaatgaagtcagcagagcggttggactgacgaaattcaatatcatgccgcatggattccatccgaatagggagtttctctggtttctgggttagcttgtttgtggatgtcttgattctttctttttcggaagggcatagttgtccttgctcgtaacagtcttcttcccagtcaatcccttcttcttgggctactatcggtagggtgtttgccaatagttcggacatggtacctttttgactttttctactccagataatgagattttttccagcgcgggtaaaagcaacgtatagtagattgagattatctacccaaagttgaagacgttcttgcaggtagtcgttaccataaatcgattcagccatttgggtggaatagttaataggaagaatatccaatgtattgaatggtgctgtttgcggggcacaccatacaagctgattattggtttcattctccagcttccagtcgcagaaaggaaggagtacggtatggaattccaatcctttggatttgtgtatggagaaaatccggataccttctacttctccactcggaattgttttactgcataatgtttcgtcccaataccggatgaatccgtctagctcggaagagttgctttgcagataatcggtcaccgcatcaaagaaagcaaataaataggcatcctgatctttgataagattcatctcgaatatgctgaaaagttcttctaaaagctcataaagaggcattagccttagttcctttgtcttttcaagaaaagcggcgggaagataattctcggcagggaggagtaggagagtattccaatccagtcctttctgtaaaacctcgttttgataggctacggccagttgggcacgtgctattttattattttcatcggaaaggaatcgcagtgcatccagcatcatacaaatggcaagagaggcgtcaaggcggaaggcttcgtctgataccactttatagtgtagctccttatcgaagtagtcggcgattcggggaatacttttattttttcgtaccaggatggctatatcattcagtcgtactccggaggtgaggagatgttgcacttcttctcccagactgattaatgtctgttcggtataatcatgttcttcgtcgggttcgagaaaagagacttttacatatcctttttctgtacttcggggagattcctgcacaacgtcggcataggctttctgcagatcctcacaatccttgcctaactgttgcttatatactccgttcagatagttggcggcagctgtgaagatttggttattaaaccggataacattggtttcacttctccggttggtagctaatgtcttgacgcggatcgggaaatgttcgatgtgattattcaggctgttgagaattccccaatcgccatttcgccaacgataaatggattgtttaacgtctcctacaatcaaactgtctgctccttgagacaatccttccagtaagagcaatttgaaatttccccattgcatccggctggtatcctgaaactcatctatcatgacgttatggatattcgttcctatcttttcgaatacaaaagaggagtcaccgtctttcaccagttgatggagcagggcattcgtatctgataatagaaaacgattgttgtcgtgattcaactgacgtacttcttcatcgatattggcgaggagttgcactttgttgagatgttgcagggataatcggcaactattcagtaacaaattattcttggaacgtaacttttcagcatcttccagaatttgcatgagactagagttggctaaattaatgatgtccgcgtagcggggagaagtcttggttgcccagttctttgcgtcttccagacatttttctactgtagcattacggatatcattgcctaaaataccattattaagtttacgaaaataacttccgattccgcgtgaaccgtttttcagatcatcagcagtcagtgcgtgtccatctagttctccttcgaattggtcatagaatcctttcatttgctccagaatttccgtttccagcgctttcagttgcttgcgatactctttgatggtatcagggtttcgtaaccgttgccggagtccttctcccttttcaatataaccttcatcgaaaatattgcgtccgaaactttttacttcgtccgacacgttccaacgtttatcgtcggcaattcgttcgttgatataatcgagtaaccatgcgagaacgggagaagtgggtcctagtttctcaatcatgctatctacagcgtcactaagaacttcggtgttatttaactcaatattcagattcgggctaagttccagttcccgtgcgagattgcgcatgacagattgaaaaaatgagtcgatagtctctaccctgaaccggctgtaatcatgcagcatatagctaagggcgacgcctgccgcttcccgtatctcctgttcagtttttcctgtctcttctttaattcggttgaggtaggcttcggaatctttatcgcctatctgtatgccgtaaagctgactaagaatgcgttctttcatttctgcagttgccttattggtaaaggtgacagcgagaatttgccggtaggcgcggggattgagaattaacagtttgatatattccactgccagggtaaatgtcttacccgaacctgcggaggctttatagactaaaagttcactcatgtttctgtttatgggatatattcgattttagcaacaatgacccgtatgtcctccggttctttccctgcctttaccaatgcctgatgaaagtttttggggaagaacatgaagaatgtatccggagtggaatctacatattttattttcttggctttgtagaaagtaacatccggtttgtattcagtgataggctctgcatattctgctgaagtaattccgaaacgttcggtgcctttcactacatattgcagatcaataccatggcggtgtgcttcaattttacgtttactgacatcttgtgttgttgcatcctgcacattgatgtagcaatgttcaccatctacttcgtatcgtccggcaggcatatttacgagatcgtgggtagctagccattggaaagtcttgtcccacactttcttgttcttgtgatattgtgaggcaaactcctgataatcggttgtcttatgaggcattgccttcagcccgttcgcccattcttgcttctgtgtccattggcgggcttgtttaagagtccagttgtcagcagattcttgtgaacatacattttctgtgaagaagaaaagaaaaagtccgataaacaggcttgaactactaaatacgaagtttgatttcatgattgttcgaaaaaattaggtccgaaaataagtatgaataaaggtagatagtcttttaaagctactcgtaatagctttaaagcttgtccaattctgtaattaatcgtttgtggagatacattcagtttctcggcaatttctttatgcgtcagatgttgattacggttcatctcgtaggcttcgagatattctttcggaagtctttttaatgcttcttcatatagacggaaaagctcatcactcaaatagaagtccgggttattgagctcactatcatatttatctacgatttcctgatgtacttttcgtttaatctcaaaatgggaaagacggttgagggctttgttcttgacaatcgtaaaaagaagagttttgagtgtcagatcttccatcagagtacaacggttttcccacagccacatcattgtttcctgcacaatctcctctatttcttcctgctcacttacatactgggaacaaaaagcacatagcctacggaaataatgtctgtagacgacgtcaaaaactttttcttctcctgcttttagggcagtgataacggacttattattattaatatccaaatatatcggagattgtgacattctcttttaatttatgtaagacaaaaataatgaaagaagtagataaatgaaataaaaatgcgagaaaaaatatttttttctttttctctttagtatatttgtgctcacaactgtattactacaaaggtattatagtttttttgtaaaaagataaaagagcatggatgaaactatcttggtgaattacctgcaaggtgaatgtaatgatgaagaagctgctcgggtggaagcttggtgcgaggaagggccggaaaaccggaaaactttggagcaactttattacactctctttgtaggtgagcgtatagcggtgatgaatactgtagatacagaggcgtcattggatcaatttaaatcagctatcagagaaaaggagaaaaaggctaagcggaaaagtatttcaatccgttggggacgttatgctactgtggcggctgcttttcttaccggactcgtttttgccggtggaattgcctggggattactttctaataagctttcggattatgaggtgataactgctgccggacagagagcgcagactgtgttgccggatggtagtaaggtatggctgaatgcatcttcaaaaatagtttatcataattctttatggagttcggatcgtcaaatcgatttgtcgggtgaagcctattttgaagtgtctcatgataaacatgctccatttatagtaaatagtaagcaaatcaagacttgtgtgcttggtacgaaatttaatgtgcgtgcacgccaagatgagaatagggtagtgactaccttgcttcaaggactggtacgggtagattctccgcgaacggaagagaatggttatttgttgaaaccgggacagacattgaatgtaaatacggatacttatcaagcagagttaattgaatataaccaacctacagatgtgcttctctggattaatggcaagttggaatttaagcaacagtctttattggaaataaccaatattatggagaagttgtacgacatcaaatttatctataaggatgaagcattgaaatcagaacggtttaccggtgaattctctactgatagcactgctgatgagatactgaatgtattaatgcataccaatcatttctcttataagaaagacggacggattgtccgagtgatgaagaaataagagataggttagtgtttctaaaaggctgtctaattagatcttgacagattaaggtttgttcgttatataaagatgtgaagtgctcccaaaagttagatacataactttctgggggcatttcacatatatgtagtggcaaactgattggaatgggatttgattagatagtctttaacacgagaaatcaccctcactacatgactgaactgcactccttaagttttgtgttcaacttttggggtgcagttcattgtaatgagggtgattttatgaacttaaggcctgtttgatagcctctattctatatttttatagttatctattcataaatacttactcacttttgggttcgtaaacattaaattctgtaacatccgtacgaccgtttgtagagatagtaataatctgatattttagatatcgcgtagtaataggagagatgaacgtgatgttttgtactactctaccgggtattgctaatgaacttaatgatttccatgtcataccattttcagactgtaatatttccacttctctaggagcatatgcatttccccagtgattcgttttgatgcctgttaaaacctaagtttctcctaaatcaacggtgaaccagaagcctttattatttagagcaacgtcagttccagtcttgccatcaattaaattattaggtgcgccgtctactccttctttcacattaacaatccaacctgcacgattactgataagttggctattgctaggagtaccactttttagattacagtaggcagctttattaatgatgacaggtaagatacttaaattactgctaatgacagtgttcttatcattggtagttacattactgattgatacactgaaagagaaacttgttttttccatgatactggcgaatatcgttggatcgaccgttgcagtgatttcttcagaagtcatctgtccttctttgagagtaacctgtgaggaacttaaaacgatctggcttgcatcaagcccttctgtttcactttttgcacttaatacgataaccatatctgtagagactgctttctgtgtttttacagtaaaagccatcttaatttcatctcctccgattccattcgcatcatgagtcagattgaacttttttacattccccgataaatagtcatttctctgtagagacacatacgtagcattccactcgttaaaaacttcttcatcatcgctacaggaggaaatgaacgggacaaacaagccgagtagagttgctattgatagtgattgaaatatatttttcatatgtacatacgattaaattattactatttccattcggtagatttatctgtagataaaataccgtcaatccaggtaggagtagcagaagtagtcaaagtatgacctttgccggttgcatcttcgaatacattgccttgtccttcattgaatcgccaataggcttccaaacccacagattttgggctaacttgagtcatgttattttgaatttgagaagcggaacgaactacagaccaaatacgtgcttcgctcatcaaaatcttacaaccactccaccatgtatcggcagaaaaccaacttatactggaaaaaatagtgggtcccgatggaatactcaagacacctgaatctattccgttaatataaagacggtaagatgaaccgtcgcatactagagctagatgttgccattcattaggcttaaaagaattgcttggattcaaataaagactattacggcccacaacttgtactaatgaatgagccttgaaattttcattatcagactgcgggtcttcaaaacgcaacaagatattattcagggcatcaccgttaccattactaaaaatagcacgatttcgattattcatattacttacttgaaaacgaacctctatcgtatattgtgcatacgtttcagatgattctgcatatttattagaagttaaattagcagaaccggtaaacatcggggctgaaaactcaataatactttcagctaaaataacaaaagttccggtatttgccattggtgaaatgcttccatcctgcaatacaagttttacaggcagcgcatatgattctcctgacttcatcatttcctgactaaaagctttcaaggcaatagagagggcatcagtggcatactgtccggctttcactgtaatagtttccggtagtgtataatatccttcgggcaacattatatatccggttccattaatgtggttataggcatccaatacagattggtccgtgaccaacttataatggttgtctgtagaagaaagattgctaagatgcacatttagagtagtaaaactttcgccagaggcttgtacagttactttttggcttgtacttgaaagtgcttcttcaatataagcatgtgtgtctaaagcatcatatttcgcatctccgcaacttaccatacttcctaagcctgctataattgcagagaagtataaagttcttatataattcatacgtttcatagtttacattaatttttaagtaatgaatgtgatgatggattcataatctggatggcacgacgtatattcttatattccggtgaagtaccaaattctgcttccatgtgataagttcctaccccacctttacggaaaccatttctaggctgccaacgtgccatgccttccaaagatttcatactattcccataacggtcggtatagggataaccgccatccatcgcagcatcggtcgcttcgaagttttcagtcattatagttcttctcgtaattacctcttcggtcattactccgccaaaagtttctaccaaccctggtccccaaaccttaccatcaataagtcgtttgtctaaatttgaatcacttcccggtttgtaggcttggataatgaaataatcaaagtaagttccaatttcaggcttggtagtaattctttgaggttcaccatcaatgaccaatagtcttcctgttccggatttcggtcccagatacttgcctaattcgtcaataaagaaaaacaaatgttcatctgaattgactatatttccggtgtagggtccggccacaggttcgtaatctatatcaaatccatcataaccatatagatttaaagtatctacaatcgcttttgcatatttgcggattgaagtttctactgcttctatattactttcgtctgacgggtatccccaaaaatcattaatagcttcctgtttactattgtatcccatttcttcccaattatccagtatattctgtggagtcagtttgtctcctacaccaccgataattgaacagtatataatttttgtacctttcatgttctggcaaaaagccatatccttacgttgagcttcagaaagattcgttccattatcccaaatagaaacaatatctacgctatccggaataccagctagagagcttttcataaaagcaccttcaccactccagccaccaaaccagccaaaggcaacttggtgatctgtctgcttataggcacgcaaggccgcataatattcatccgatacgatcgattcgggaaaagtttttgcttccgactccgtccagtcactgcaaccgatcaatgaggtcgttgccagtgatatgagtacaatgtataataaataaattttcttcataaaagtcctttttatgcattatataaattagttctttttagcccactttaagtcagtagcttcattatcagcaccaccgagttctgctactcccagatcataattggctttattgttttgtgcctctgtataagggaagcttaaacgacgcataccgcgttggctgctcacaccacaatctgatagattgtcgatacaaggataaagttccggataacctgtacggcgatattcagcccatgcttccaatcctaatggataattggcgatccatttttgagtaatgacacgttggaaattctttccatttacgttgtcagactcgctgtcatcccacattacactcacagtattggtaattgtagcagtagcattttgcacaacatcactttcatgtgatacgacaggagcctcgtcaatcttcatgtattcagtggctgaaacctgatattgttccattgataaattaataccatcttcgtaataggcttttgctgttttagaaccgacattccaaccacgcaattttccttctgcacgtaaaaacgctgtctctgcagcacagaaaaccattaatttagaagttgccgtatatgcaggaatagagaatcctgctgcatctgcctttttaaaatcagcatctccagtacgcatacctacatatttatctgttttcccggcaagggtagacttattaaagaacttcggcatacgtggatcgccatatgcattcatataatctacaatatttgcattcacacgcagatcaccccaacttacagctgccagttgatagggattactctgcgtgccacaagaaagcatagcattatccgaattactttcaatcaatcctgctttatgtgttactgctgcttcagctgcctcttgagcaatgccaggccatgttccgctgattcgcattgcaacacgtaaacgcattgaattggctagcttagcccaacctgaataatttccatcgaaaaccgggtcattggcacctaatggtgcgttaccattagtctctacataataattataaagaacgtcagcagcattagctaaatcacttaatatatttgcataaacttgttcctgagtatcataagaaacataaaaattacctttctttacttgactataaggcatcggtccataacagtctgctacacgaagcatcgttattgcacgtatcatacacgcaaaagcataataatgtcccgtagaattagttgcttcctgtatttggaaaaagtttccatatattttttcaaacggagtgttccagggggtagcattccaggcatcactctgattgaatgtgctgaagtttgtaccactccatgtgttagaacagcatagatagccgcccagctgtcccaccatctgatcttgcatttgagagtcattctgttgaatattcacaattgtttcaatcatagacttcatcaaagtcgcagggtctgcatcatgaatttgatattgattcgtattatactcctcaaatttatcggtacaacttcctgccagtaacaacagagcggcaccgactgtgatatttcttaaatattttctcataacattagcttttcttttagaattgaactttcacattaaaaccgaagttacgcaagctgggttgcataaagtagtctacattcatataatagttactggaggtagaggcagacaattccgggtcaaatggggctttacaataaatcatccataaattacgtcctacaatacccaaagtaacattcgccacatttttaaaccatcttttaggaagtgtatagtttagactcaattcctgcaaacgtacattggttgcactatatagataataacgaccatagccaccttcacccgtaccaatagtctggtaatacttttgggcgttaactttgccgttattaataggtataccaccattatcacgagctgttgcagatgtttcggatactccataataatctaaaataccttgagtagccgaataagctaatccgcctacacgggctgataatacaattcctaaatcaattcctttataagtgaaatgattggtccatccgaggttgaaatcagcatccagattacctacttttaccggagtgtttgatgaagtgatacccagattaccattctgatcgacttttatattaccgttattgtcttttgtcagctggttgtatacatagatatcagtcatggagcctccttctgtcaggatgacgcgaggagctacattctctttacctaaccaacccacattcatttcatccatttggatagcttctcctgtcacaggattcacgctaccgcttgccagtcgtttcaccttgttacggtttagagtgaaggttgcattagaagaccatccgaatcctgcccatttatcactgaatcctaaagctaattcaataccctgattttgcacgttaccagcttgtacaatcgcttgtttatatccggaagaagaggggatatctaccttaaatgtttggttcagtgtattagaacgatagtaagtagcgtctaaattaaaacgatttccccagaatttcaagttcaaaccgatttcccaggatttagtcttttcaggtttcatattgtccatcggatatacggtcggatttgcccagttatgtgtctggctgttgtattcgtaccccggattagtaaggaaacgatcgaaagaagaggctaccactgtatacgaaccgcgtattttagcataagaaatcacctctggtagtttaaccatttctgataataaagccgataaaccgactgacggataaaagaacgatttttgtttggagaatgcgagttttgaatcccagtcattacgtccggttacggttagatacagttgatttttccaacttaattcagcactggcaaaaatactttgaatttcatcttcatatccggtagggtccggtttatagttggcggagaaattaatattgttgatctggaagaagttgggaataaccaggtcacctgcaatatataactgatccattgaagtatgatatatggaagcaccaacattggctgttaaatgaaaatcaccaaatgttttatctatattagccaggaaatcggcatataaagaacgttcctgacgcatggcatcttcaaaaccaccgcttacaccacagaatgttgttaatgtagaagcagatttttcgtttttattccggtagtcggagttgtccagattgacacgaccgacaacattgagccaatctgtagcctgccatttcaaagaagcgttcatcatataacgtttcttgttggaggtacggttgatgcgattttgtatccaatatggattttgtaatgacaaacttgcatcaccataaggccaatattgttccatatagccgtagttagtattataacgttcatacaaacgaatttcgtcaaagttgtctccacgagggaatagatacagtgatgggagagggttataatactgtccttgagaaaccatgtttttgttgttctgaacgatatattgtgcaccgatatccagagtaagtttatcattcaggaaatgggtggtattacgtgccgtaaaattataacggttataggagttattcggaagaattccaccggagttagttgtagaagcagaaagataggtctggtttttggtatttcctgtagataatgctaccgaattgataacattggatcctgtttcaaagaagtcagatgggttatatcgacggtttgccaattctccccagctgaataatccggaacttgtaccataacggttctgcatatccggcataatatatgctttagagaaagtagtactgttggatactgttatggtcgttttctctgtttggccttttttagtagtaattaaaacaacaccgtttgccgcagcagaaccatataatgctgccgcagaaggaccggtcatcatactaatactagcaatatcatcaggatttaagtcagcaacagcatctgatcctcccatttctccaaataatccttcgccaccgctttttcctgtattaaaaataggtacaccatcaattacatacaatgcattgttatctttagtcagagatttcataccacgcataacaacacgtgtggcaccaccagcaccggttgcaccactattaatttgaacaccggcaacctttcctgataatgaattcataaaattggcgtccttaacagctgtcaattcatcaccttttacctcttgtacattataacttaacgccttggttgcacgcttgatacctaatgcagtaacaacaacttcatccaatacttgtgtatcttctcctaaggttattttaagaggttgggcattggcaagcgtgattgtttgggagaaaatcagtttcatatactttctctagatccaatgcttgttagataaatagattaaatgttctatttttaagatatcaggctaaatacaattgagcaaaatcaatgaatgaaagaaaaagttagtatgattgcacatgaatatgcagtaattaaattgtttttattcatatatgcggtatgaatattcgataaaagacgttttttcaggaatgttccacaccgagaatcacttcgtttctcggtgtggaacattttgattctttaaatggaacctaacaaatcatttaaagaataataataacttgctttatagtagttgttttcttctagttagtgcagataatacaaagaacggaatcttttcatttgattaatattatcaatattagatattattctatcactacgcgggcgataaaaagaataaattgcaataatatcatcctttttttatttgaattacgtttggctaaagtggaaatccctgcggttttcgaaacactcctgataacaagatgcatattctaaattataggtaatctgaatatgcgttttttaatattatactcacttttatcctatatcaattattggtccatttttcattgtacatacaatttgcatgcaaatgtattaatctagagattaaagttagtcaataattgagcattccttattctttcctctttttcaaagtatgctaaatagtgctcggttacagataagttagagtgtcccaagctttcagaaatatatgaggttttcgcacctccacgttttaatactgtagcaaaagaatgccttgccgtgtaagtcgtcaactgaaaaattccaatgtcttgggctatttttttaagtcttctgttacatttggttataatacgccgtaccaatctaatcttttcaaaggcatcttcagttcctctagcatatttaaaaatatacgtttgcgggcttaatcttggattaccccatttttgaataatattccacatttcaggagtaatgattgcatgtatctctttgttatgtttggtagttcgagatgtcttagagcgtacaaagcatatttctccatccataatatttgaatactgaagaaataataaatccataaaattaatgccattacataaataagaaaacacccagagatccctaaattcttctatatcttttgtttcacattgataggacattactttttttatttcagaaagagtaagtgctaatttacgtccacacccttcaggaatttcatatttattctttccaaaaggaaaagatgattcttttataataccatcatgtacagcacgatttaagacacactttaaagctcggaaataaatacttatgcttgaatagcttttaccttctgatatccaaaatttttcacaacgtttaagccaatcaattgtaatgttttccaaaggtatagtggaacctccgaaatcttctaaactttttaaagcactttgataatttaggtaagtgtttgcttgttcataggcttccagttctttcatttttaagcgaaaagcactgcgtaaagtcatatcattcatctgccttcctaacctgacgcttaatgtttcaatactaaattccccttttgttatcagttcattaacttgttgcttaatagttgaaaaactactctctatatctgatcgaatttctgccaataaccggctttttacttttaataaccttgcccaatcttcttttgacacttccttcccagttgagtaatatttttgctttcttctatataccacttgaactttaacaggaaactgtccactcttttttgctcttctggtatctaatatggttaaaaccgaaattccatcttttgaatatttgaacataaaatgaatatttatatctatacaataggtaaagcatacatatattgtatgcaaaatgtatgcaaatgtaataaatcagcctgattttaataagtacataagattctatttatcaaatatttgagtatttatttttcaattaggaatctttctattctatttttttcgaaaaaaatcttatcttcgtttagtaaggttacaacataaaatgtattactattgaataagcgcttatggaatttattttaagtataacctttaaatttattaattatgagaaacagagatacatgaaacctttgtgtgaaaacggtaatctcatttaccgcctctaattacaaattctctaaaaactatttctaattaaaaagaataagatgaaagaaattataaaacacaagttttcatacttgttattcttccttttgttggtttcgtgttttgcttcagcttatgggcaagaacgaacgatcactcttaatctatcgaaagtacccttgaacactgctttgaaagaaattgagaaacaaacttcaatgtcagtagtctataacacaaatgatgtcgatataaatcgtgtcatatctatcaaggtaacaaaagaatctttgaataatgtaatgaatcagttattcagaggagtaaatgtcagtttttcaatagtagataatcatattgtactttctgcgaagagtaataaagaagagcagcagaaaaaaacaccaattactgcaagtggtactgttactgattcaaaaggagaaccattgattggagttagtattttggtaaaaggaacttcaaatggtactatcactgatatggatggaaatttcaaaatacaagcagctaaaggtgatgtacttgaagtatcctatatcggttatgcctcccaagcaatcacgcttactagtgcacaacccttgaaggttactttaggagaagatacgcaggtgttggacgaagtagtcgttactgcattaggtattaagcgcgcaactaaagcattaagctataatgtgcaagaagtaaaaggtgatgaattgacaactgtaaaaagtgccaattttatgaactcactggctggaaaggtggctggtgttaatatcaatgcatcttcatccggtgttggaggggctacacgtgtagttatgcgtggtaccaaatctatatcttcagacaataatgctttatatgtaattgatggtgttcctatttttaatacaaataaaggtgacactaacggacaatattcagcccaaccgagaggagagggcatatctgatatcaatccggaagatattgaaagcatgtctgtattaagtggacctgctgctgcggccttgtatggctctaatgcagcgtctggtgtaattttaattactacaaagaagggaaaagaaggtaaggcacgaattattatttctaataattctactttttccaatccttttataatgcctgaattccaaaattcttatataaaccgcgcaggttcctttgcttcatggggagataaagcgtcttctcttttcggaacttatgagccaaaagattttttcaatactggtactaatatccagaataacgtttctttatctgttggtaatgaaaagaatcaaacttatctgtctgtaggtactactaatgcaactggtatcattcaaaatagcaaatatgaccgttacaattttaccttcagaaatacaacaaaattcctgaaggataaaatgacattagatgtgggttttagctatattattcaagaagatcttaatctaatggcacaaggtgaatatttcaatccactaccagccgtatatctgttcccgcgtggcgaaaactttgaagctgtgaggatgtataaaacgtatgacacaactcgtaagatagatgtacagaactggggatggggtgatcctggatacagtatgaaaaataatccatattgggtggctaatgagatgaaccatggcatgaaaaaacaacgttacatggctaatgcttgtttaaaatatgaaattttggattggcttgatgtgacagggcgcgttcgcattgataatgcaaccaatgattattcagataaaagaaatgcttctactgatctttactttactaatagttctatttatggattctataagtactataaagctgacgatagacaggcttatgcagacgtgatggctaatattaataaacgctttggtgacttaagtttaagtgctaatattggcggtagttttactcaaacttattatgacgaaagaggattccaaggtggtttgaaagatatgtctaatgtttttagtctatataatatgactactaccttggataaagatacttatcctatagaaagtggatataaacaacgtaccaactctatttttgctagtgtggaaattggctggaagagtatgttatatatgactttaaccgggcgtaatgattgggattcagcattgattaatacagaacaatcatctttcttttatccatcaataggactttcaggagttatttccgaaatggtgaaattacccaaagctattacttatttgaaagtacgcggttcatttgcttcagtaggtgctcctattcctaagaatctttcttctaacaaaacgtatgagtgggaccctgcgactagtcaatggaaattacaaacttaccgtcctttgcctaaactttatcctgaacgtacaaattcttgggaggctggtttgaatgccaaattctttaataatagtttaagtttggaagttacctggtataaggctaatactcgcaaacaaacattccaggttcctttgtcaggaaccgctgtatatgcgactatgtatgcacagtctggtaatattgagaataaaggtatggaattttctttagggtataataaatcatggggagatttctcatggaattccaatttgacttttagttttaataaaaataagattgtagaactcttggatgatgcagtggatgatgaaggtaatcactatagtttgaatgagatagataaaggtggtattggatcggctaaagttattcttcgtaaaggaggaagcatgggagacatgtatgtcactaatcgtttgaaacgtgataacgaaggaaatgtatatattgataaagcgagccagaatgtaaagaaagaagatataaagaattcggatgagtttattcatattggctctgtattgcctaaaagcaatttaggctttagaaatgacttctcttataaaggtattagcctgggatttatgcttgctgcccgctttggaggtattgttatttcaccgacacaagctgtgatggatcagttcggagtatctaaggtcacagctttagcacgtgataatgaaggtgttcctgtaaataatggaaaagtggatccccagacttattatacagaagtgggtggaataagtggattgatgtctaactatgtatatagtgctactaatgttcgtttacaagagttatcggtgggctattcacttccagccaaatggtttaataacaaatgtaatcttagtttgtcaataacaggtcacaacttgtggatgatttataataaagcaccatttgatccggaagctaccgcttctactggtacttattatcaaggtgttgattactttatgcaaccaagtttgagaagttggggatttaatgtaaaaatacagttttaacgataaaagaataaccaaatgaaaatatataaattcataacgcagatttctattgcaggttgtatgcttgttggaactccaatgttacaaggatgcatggataatagcttgaatgatccgttgggaaaagtttcggaagaagaacttggacgagatggatttgctgccaatgctttcttcttgactttatgtgattatgcatatcccatagctactgaaaacatttataataccaatgaatccttgattggtgactgctatggacgttatcaggtaatggcaacagataagtttaaaggggcaaattttgctacatataatgcacccgagaactggttaaactggcagtttgcagatgataatgtaatggtattgacgtatggtgcatggaataaaataaagaatgtaacccaagggacaggggttaactttgcatgggcacagatcctaagaattgcgacaatgcatcgtatgcttgatatgtatggggcacttccttattcccaaatttcaagtgataaactttcgactccttacgatacaatggaggaagcatatcatgcaatgtttactgatctgactgatgcaattaatgtaatgactgtttatgtgaccgaaaatccaaacaacagaacgatggctaagtatgataaagtttatgacggtgattttgagaaatgggtgaaatttgcaaattcactgaaactacgtatggccattcgtattcgttttgcagatcgtgaatatgccagacagatggcggaggaagctattaaccattctataggggtaattacttccaatgaagataacgcaacttctttaggcactaaaaatcaattgtatacggtattagtgcaatggcctgaccaatgtgtctctgccgatattacatcttatatgaaaggatacaacgatccacgtatgtcgaaatattttaaaaagaaaacgagcgataaaggagatgatgattatgtgggtatgcgcgcaggtttgtcttatggtaatgatattaccggaccgactttctctagaataaatgttggagagatggatcgtactttatggatgagtgcagctgaaacagcttttaataaagctgaagcggcaatgttaggatgggatgtaaaaggagaaacggtgaaagatttgtatgaatcagctatcagactttcctttgcacaatggggagtatcggatggtattgaccaatacctgaatgatgaatcaagtactcaggctgattatgtagatcctaatgagaataaggggaatgaaagtgctattagttctataactatcaaatggaaagatgatgctggtgaggaagaaaaactggaaagattaataacccaaaaatggattgcaatgtggcctttgggacaagaagcatggagcgagtatcgtcgtactgggtatccgcgttttttcccgttattgaatggaaatgtaaccaatcttccttccgctaatcgtattccgttcccaccatcggaatatattcgtaatgctgctaatgtaaatgctgctgtaagtaaattgggtggcgctgataattatcagactaaggtttggtggcagcgtagggataagtgaataatagtataatctatattaatataaatagtatgagaaagatattctattttataatgttgttatttggcataacggttgcgaatacagcgtgtgatgattggacagacatggaaccaaaattccaggaagatatgactcagtcgtcacttccggaagaatactatgcccagcttcgcgcttataagaaaacagatcatccggttgctttcggatggtttggtaattggaccggaaatggagctactttagaaaaatgtttagccggacttcctgatagtgtggattttgtttctatttggggtaactggagaaatttgacagaagcgcaaacaaaagatttgcgttatgtacaaaatgtaaaagggactaaagctttgatgtgttttattgttcaaaatatcggtgaccaattgactcccgaggaatataaagataattatctggaattctggggatggaatgagaataaggaagaagctataaagaaatatgcccatgcaatatgtgatagtattgataaatatggatatgatggctttgatattgactatgagcctaattttggtcatcgaggtaacatgagtggaagtgatgagaatatgttgttgttcattcagaccttgggagaaagaatcggaccaaaatcgggtacagacaggctattagtaattgacggtgagccacaaagtattgtatcggagtcaggtccttattttaattattttatagtgcaggcttatgattctccaggagataatactggacgtgacaatttggatagccgtttaaactctacaataagaaacttcgatgggcatttgactgcagaagaagttgctaagaaatatattgtaactgaaaactttgaaaaatgggctttgtctggtggggctgatttcactgatcgatatggaaataaaatgaagtcattggaaggtatggcacgttggacacctattattaacgggaaaaaatgtgtaaaaggaggggttggaacttatcatatggagtatgaatatacaattgatggtacagaagaatcttatccttatttgcgtaatgctatccgcattatgaatccaccggtaaaataataaatttaaagatataataattatgagatatctggtaaaaaataaaaatacaataatgttcgcctttgccatattgctttgtgcaattatagcaagttgtgaagatgcaaagtatgatactatcggcagtagaatttatttagctgaatccagtagtttgtcttatgagtccaaaaaggtaacagtagccgaagagggtagtgttgtcactgtgactccgcggtcgggacaaattgcaacagaagatatagaagttactttgggactaagtccgaaatcgttggaagtatataatacaaaaagtggtacgaactataaatctatgccggaaggttcatattcttttgatcaaaagacagtggttataaaaaaaggagaattagtggctcctactgttaaagtaacaattgatccgttgacaaaggaaatgcttgattctggtgataaatttgcactaccggttgctattactgctgtatcaggtgggcaacaaactttggaaggtgcagatgtgatgatttatatcatggatcaggttattataacctctgcaccagtgttgacgggtacaaaaccaattactatggaaatgcgtcaggattatacagtaactcaatggtcacttgaaatgcgtattaatatgagcgaacttggggatggggtgactcctggagttggttatcctggtcctcctagctatcagaatcaagcaatattttctgcaggtccaggtaatggtatcgcagaagatggtgaaatttatatccgttttggtgatggcccgattcctggtaatattttgcagataaaaacacaaggtactcaagtaaatgctgctactaagtttaaaaataatcaatggtatcatttagcatttgtttgtgatggagtgaaattgactatttatgtaaatggaaatattgatgcaacattagatcttccaagaaaacctttgcgtcttgttaagaatagttttggtatatgcaatggtgattggatggttacagatgctatagttagcgaagtacgtttttggactactgctatttcacagtcgcagattcagaataatatgtttgcgataaatccgggtacggatggcttggaggcttattggaaattgaatgaaggggcaggaaccgagtttaaagacgcaactggtcatggaaataaagccacggcgcctaatggagttgtcagatgggtagatggcattagatcagatggtaaataatataatattcaaatgatgtaattatgagattgaaaaatataatatggaaaacagtagtgatgtcattaatggcatcaccactgtgcatctcttgtgacgatgatgacgaagttactgtaaattctaagttttatctttctacgaaagtttttccggtagattcttatgaagcatcgttgtcagtgattttgaaagataattcagtggtcgtaaatgagttacaacctaattatcggtttgttgcatgtgccacggagagattatcgaaagatgtgaaaataacagccgatagtgatgataatctagtaagtgcttacaataaagctaatgatacggaatataacatattacctgctgaaaattattctttcaccaataaaactgttactattgaaaatggagaaagtgtatctggagattctataaaaatagagctattaaatgtaggatcgttgactacagaagggggatatttgttgccagttaccatatcttctatagaaggtaataacttagatgcacttagctctaacagaggagtagtttatgtgaaaattcaaaatattcatgtcaatgtagagtccgggcaaccggctgaaggtactttgattgccgatcgttctggctggactgtaaaagttgccccgacgactcgtggagatgctaaaaatctaattgatggaacaaattctgatgtagctcgtgatggaggagcagaatattggctaactgtggatataggtaaggtgcagacattaacaggaataagaaataagtgttatgctagtagttattcaccgactgcagtagaagtatttaggaataaaatggaaatctatcggaactgtaactatttcaagaagtggcacacaatatattaagttttcgaaagctattgaaacgcgttatttaaagtattatgtgaaacaaggtcccaatacggtcagccttacggaatttgacctatatgcgaaataattaataggttattgaaaatttttaagtcccactttttcgtattttcggataaagtgggacttattatataagttaataaataaaaaaagaaaaagattgattgtttaatagtatcatattgattgtattactattatataataacttttaatagcaagaaaaacatgaaattatctattattctacggttctgtttatggtttatgggaattagtatggcgtttccgtctctctctcaaactatgttagtaactaatgggaatacaagttctaggatcattttgaaagagaataatcaaatatcgtggacagctgcaaatttgttacaaacatttattcaaaaagtaaccagttgtaagctgcctgttgttgtaagtcaaactcctcgaaaaggagatattctcattggtggtcaatcttcggcggaagtaacagaggacggattctctatttctactcaagatggtattctaaaaatatctggtaaagaaaacggtgttgtatatggggttgttactttattggagcaatattggggtatcgattattggggagagaatgaatattctcttaccccttcaaaaacggtgaacttacccttcattaataaagtcgagaatccgggctttcgttaccgtcagacacaatgttatgctatccatacagactctatttataagtggtggaatcgtttagaggaaccgaatgaagtgtttgctgccggttattgggtgcatacttttgataagcttctgccttcatccatttatgggaaagaacatccggaatattattcttacttcaaaggaaaacgccacccgggaaaggccagtcagtggtgtttgagtaatccggaggtttttgagattgtagctcaacgtgttgattctattttcaaagcaaatccagataagcatatcatgtctgtaagtcagaatgatggtaattatacaaattgtacgtgtgatgcttgtaaggcaattgatgattatgaaggagcattatcaggaagcataatcacttttctgaataagttggctgcccgtttcccggataaagaattttccacattggcttatctatatactatgaatcctccgaaacatgtgaaacctttgccgaatgtgaatattatgctatgtgatattgactgtgaccgtgaagtaactttgacggagaatgcttcgggaaaagagtttgtgaaagccatggaaggatggtctaagattaccaataatattttcgtgtgggattacggtattaactttgataattatctggctccatttcctaatttccatattttacaggacaatatccgtcttttcaaaaagaatcatgccaccatgcatttctctcaaatagcagggagcaggggaggagattttgcagaacttcgcgcttatttagtgtcaaagttaatgtggaatccagaagttaatgtagactcattgatgcaacattttctgcatggatattatggggaagcagcgccatatctttatcagtacataaagataatggaaggagcattaattggtagtggacagaggttgtggatatatgattcacctgtatcacataaatatggcatgctaaagcctgctttgatgcgtcgttataatcatttgtttgatttggctgaaaaagctgttgaagcagaacctggtttcttgaaacgagttcaacgggcacgtctgccaattcagtattcagaactggaaatagcacgaacggagacagaaaaagacttagtagatatcaataaaaagttagacctttttgaggaacgcgtgaaagagtttcaagttccgacattgaatgagcgttccaattcatcggtagactattgtaaattgtacagggaacgttacatgccacaaaaagagaaaagtttggcattgggtgcaaaggttacttatctaattcctcctaccggaaaatatgcggcattaggaaagaacgcactgattgacggtttgtttggtggagcaacctttgttgatagctggattggttgggaaggaaccgatggtgcattcgttatagatttgggcgaagcgaaagagatacatagtgtggaaacagattttcttcatcaaataggggcctggattctttttcctctaaaggtggtttattcatacgctgaagacggtgagcattatacacattggaaaacgattgatttactggaagaacgtaccggtgaggtaaaattccgtggagtcaaggctgaatcagccgaaccgataaaaactcgttatgtgaaagtagaagtcaccggaacaaaagaatgtccgacttggcattatggtgtaggccatccttcgtggttttttatagacgaagtgataataaaataaaaaaagtaggggggagacgttagtagtttcccccttttagttgtattatatatagatgggtcagaaaaatgaattttttcatctatatactatgatttatgcaacagaataaaactgcttctcaacgaaaaactattaacccggcttgctgggtacctactgcttattttgcaatgggacttccctttattgctattaatctggtttctgttttcatgtttaaggatcttggaatttcggatacgcaaattgcattctggacttctctgattatgatgccttggacactgaaatttttgtggagtccttttcttgaaatgtatcggacgaaaaaattcttcgtattgattacagaattattgagtggtgtattgtttggagtagtagccttttctttgtttttcgattactttttcgccataagtatctctacgatggcagtgattgcttttagtggagcaacgcacgatattgcttgtgatggtgtatatatggctgaattgaacaaagaagatcaggcaaaatatatcggagttcaaggtgctttctataatgtagccaaattggttgctaatggaggattagttgctatggcaggagcattggcagagcacttcggagcaatagaaggtgcttcgatagatgctaacaaaggagcgtattcatctgcatggatgattattttcggcgtaattgcggcaataatggtactgatcggtatttatcatataaaaatgttgccttctacacaggttccgtcaacaacaaagaaaactgcatcggaggttggacacgaattggtagcagtcattgctaacttctttactaaaaagcatattctttattacatctgttttattattttatatcgtttggcagaaggctttatcatgaaaatagctccgctgtttttacgtgcttcaagggatgtaggcggcttaggactgtcgttaacagagatcggcacgctaaatggtatctttggttccgctgctttcgttttaggctcattgttagcaggtatttatgtctctaagttcggattgaaaaagacattatttactctctgctgtatttttaatcttccgtttgtagcttatacttttttggcagttgcacagcctactaatgtatatctgatcggaacttgtataacaatggaatattttggttatggctttggttttgtcggattgacgttgtttatgatgcaacagattgctccaggtaaacatcaaatgtcacattacgcatttgcttcaggaatcatgaatctgggagtgatgcttccgggaatggttagtggttatcttagtgacttattaggatatcgtaatttctttatctatgtgttaattgcaactattccagcttttctgattacttatttcatacctttcacgtatgatgactcaaaaaataaataatataaaatcaacgattatgaataaaattcaaattccttgggaagatcgtcctgtcggatgtacggacgttatgtggcgttactcacaaaatccagttatcggacgttatcatattccttcatctaatagtattttcaatagtgctgttgttccttttgaggatggttttgcaggcgtattccgttgtgataacaaagctgtacagatgaatatctttgcaggttttagtaaggacggaattcattgggatatcaatcatgaacctattcagtttaaagcaggtaacacggaaatgattgagtcggaatataaatacgaccctcgtgttacatggattgaagaccgttattgggtgacttggtgtaatggctatcatggccctacgattggtattgcctatacttttgactttaaggagtttttccagtgcgaaaatgctttcttgcctttcaatcgtaatggtgtacttttcccgcagaagatcgatggcaagtatgcgatgttgagtcgtcccagtgataatggacatactccgtttggcgatatatacatcagctatagtccggatatgaaatattggggtgaacaccgttgtgtaatgaaagtgactcctttcccggaaagcgcttggcagtgtacgaagattggtgcaggttcagttcctttccttacagatgaaggctggttgctgttctatcatggtgtaatcactacttgtaatggtttccgttacgctatgggagctgccatattggataaagatcatccggaaaaagttctttaccgtacacgtgaatatctgcttggtccggctgctccttacgaacttcaaggtgacgttcctaatgtcgtattcccctgtgctgctttgcaagatggtgaacgtgttgctgtttattatggtgcggcagatactgtggtaggtatggccttcggatatataaaagagattatcgattttacgaaacgaacgagtatcatttaataaagatatgaaacgtattatattaacttacacacttgctttttcccttctttccgcctatgcgggggaaggggggagccctccccttaaaaatacggataaaagtcttttgatagattatgtggatccttttatcggaactacaaatttcggaacgaccaatccgggagcgatttgccccaatggtatgatgtctgtggttcctttcaatgtgatgggatcttccgaaaacacatacgataaagatgcccgatggtggtctacgccttatgaatatacaaattgtttctttaccggatatgctcatgtgaatttgagtggagtcggttgtccggaattaggttctttattattgatgcctactaccggagaactgaatgtggattataaagaatatggtagtaagtataaggatgaacaggcctcaccgggctattattctaattatctgactaaatataatgtaaaaacagaagtttcggctactccgcgtagcggtattgcccggtttactttcccaaaagggaaaagccacatcctgctgaatttgggtgaggggttaacgaatgagagtggcgctatgcttcgtcgtgtaagcgatagcgaagtggaaggagtcaaactacttggcacattttgttataatcctcaagctgtattccccatttactttgtattgcgggttaagaagaatccttctgcaacagggtattggaagaaacaacgtccgatgatgggggttgaggctgaatgggataaggatcagggaaagtataaactttatactcgctacggaaaagaaatagcaggagatgacattggtacttatttctccttcgatacagaagaaggtgaacaagtagaagtacaaatgggagtttcttttgtaagcatagaaaatgcccgtttgaatctggatcgtgaacaggctggaaaggattttgagaagattcatgcggaagcacgttccaaatggaatcatgacttgtcacgcataacagtggaaggtggtacagatgcccaaaagactgtgttttatacagcgctttatcatttgctgattcatcctaatattttgcaggatgtaaacggagaatatccggcaatggaaagtgataagatcctgacaaccaaaggtgatcgctataccgtattttctctttgggatacctaccgcaatgttcatcaattgctgaccttggtttatccggaacgtcagatggaaatggtgcgcacaatgcttgatatgtatcgtgaacatggatggttgcctaagtgggaattatatggcagagaaacattgacaatggaaggtgatccgagtattccggtaattgtagatacctggatgaaaggtttgcgtgactttgatgttgatttggcttatgaggcaatgtacaaatctgctacgttaccgggggcggaaaacttgatgcgtcctgataatgatgattatatgtctaaaggatatgtaccccttcgtgaacagtatgacaattccgtctctcatgcattggaatattatattgccgattttgcattgtctcgttttgcagctgctttaggtaaaaagaaagatgcagagatgttctataaacgttctttaggatacaaacattattatagtaaagaatttggtactttccgtccgattctccccgatggaacgttttatagcccgtttaatccgagacaaggagagaactttgaaccgaatcccggtttccatgaaggtagttcctggaattatacgttctatgtaccacatgatgtatatggcttggcgaaattaatggggggaaagaaaccttttatcgataaactacaaatggtttttgacgaaggactttacgacccggcaaatgaaccggatattgcttatgctcatttattctcatactttaaaggtgaagaatggcgtacgcagaaagagacgcagcgtttattagataagtactttacaacaaaacctgatggtattccaggaaatgatgatacgggaacgatgtcttcctgggctattttcaatatgatcggtttttatccggattgtcccggactgcccgaatatacattgacgactccggtctttaataaggtaacgatccggttagatccgaaatggtataaagagaacgaattggtgattgaaaccaatcgtactcaaccaggagctttatatattgataaggtactattgaatggcaagaagttcaataaatatcatatcacacatgatgaacttgttcacggcaaatatttaaagtttgatttgaaataacacacagtgtttcataggtatcgtttttgggttgacagggctgtcggacttcttatagtccggcagcccatttttttacatttacttctgttattacttcttcgaaaatagtgacggtatatgcccgggatagtgacggtatcggactaagatagcgtcactatttgtcttggataccgtcactatcttacttttattaaattatactccgtagtatttttagttattctctgttttataggtgattacaaaaatctattccatacgtctactatgtaaatcgtatgcaataaaataaaaaatgagaagaaatttatttaaacatatcctttggatattgatacttgcagagtgttttcctctattggcaattgccggatcgcagcaaaaggaacaacgttataaaatagccgtatgtgactggatgattctgaaacgtcagaaaatcggttcattccaattggtacatgaattgaatggtgacggtgtagaattggatatgggtggtcttggcaagagggaaatgtttgataataaattgcgcgagccccatttccagcagttatttcgtgaaactgctcaaaaatatcaattagaagtttcttctattgctatgtccggtttctatggacagtcttttctggaacgagctaactataaagatttagttcaggattgccttcatgccatgaaagtgatgaatgccaaagttgcctttcttcctttgggaggaatcaaagccggatgggaaaagattccggcactacggacagaagttgtaaaacgcttgaaggaggtaggagatatggcagcttctgaaggggtggtgattggtattgaaactcaattggatgcaaaaggagatgtgaaactactgaaagaaattaattctcccggaatcaagatctattttaaatttcaaaatgcattggagaatggaagggatttgtgcaaggagttgaagattctggggaaaaagaggatttgccagattcactgtacggacacagatggagtgactttaccttataatgaacgattggacatgaataaggtgaaaaagacgctggataagatgggatggattggatggctggtagtagaacgttcgcgcgataaggatgacgtgcggaacgtgaaaaagaattatagtacgaatattaagtatttgaaagaggtgtttcaacagagataggaggatattatgatatagttaatattacaaagagagagaaaaaaatgcaaaatctattttttttattcttttaagtgattacatattttttgattgtacgtctttccttaaaagaacttttagattttgaagatataatgtattatttttgtttaaattaaaatttaatctatgaagagtaagatgaagattaaaatgaaagttgtcgggagcatagcttgtttatcgatgattttatttatgggctcttgcgctggagatggttttgatgaagaaaccttctccggtggcgtgacgaatacgcaattggattcgccgaaagcatcggatgtggcttttgaaaaactggctacaactgaaaataatgtaaaagttacttggtctgttgttatgggggcaggtggttataaattttctatgtacattgtagatgaccctgatcatcctgtagctgtagtgaaggacagtattgtagacgggacggctgtagtatgtccttgggtagaagatacgaactataaggttgagattgcagcattggggaatgaaaagttgaataatacagcttccgtttccgccactgaaatcagttggtctacacttgttgccgcaacgcttgttcctaatggtacagacttgactacatattttgctgaacatccggtgactacgggaaaagatacagaagttgctttcgaactggaagcaggagggacgtattatatttcaggagatttgaactttggcgtaaataatgtacagttgcgcggaaataaaacacgcgggaatgcgaatgtgaaattcactgctccggcttctattattacttgtggtggaggattagccttgaagtttatcaactttgattgtgatgtagtgacagatggggcttttttaaagtttggtgatgttccggaagagatattggatacaaagagaaccgatcatggaaaagtaactaatcctatggttattcaatcttgcaatatcaaggctgttagaaaatacttagttcacattaacggaaagaagtatggtattcaaaattttgcaatcagaaattgtgtaatagattgctatcaagctgctgacctgataaactttaactctagcagttcgattgtgaaagacttcgaaataagtaactctacgatttatagtcataaccaaaacggttctcgttttttacgttatggaggtggacaaacaaccagttatgatggttggtcaagaggatcgatgacatttataagcaatacattctataatctctcctattccggacagagttttaatggcaatggttggtcacagacacataatgaggtaatttcaaagaacaatttgtttattgactcattttcgggaaatttcaatcgtcgtataagaatgcagggtacaaaggtagctgcaacttttgaaaataactgttattggtacaatggcgcattgccactggatgagacttcaaatcgtgcggatggtgataagagcaattctgcttatggcgtggatccgggattcgctgatgctgcaaacggtgattttactccgagtgctcccgaagtatttgctcatggtagtggcgacccgcgttggttaaattaaaaagataataaatctagaatacgataaagatgaaacataagaatatatatagaatcagtatcagcctgcttctagcttttgtgatggctttgccgacaatagcacagaatactaaaacattcaaaggagttgtgctggatgagaccgagcaacctattattggagctgccataaaggttgtaggaacaacagtgggaacaataacggatttagatggaaatttcacattgaatgttcctgatggtaaggaagtggaaatctcttatataggatatgtaccacaacgtttttctgctccattcaaattgacaaagatcatcttgaaggaagatacgcagcaattggatgaagttgtagttgtgggttatggtacgcagaagaaagcgcatttgactggtgctatcgccactgttcccgttgatgatattcaggatatttcaagtggaagtttggccagtacattgagcggtttggcaaatggtatctctgtaaacggaggtgatactcgtccgggacaaaacgctacgattactattcgtcagaatggtgagttggaagaaatgggaggtaccaacctgcagccattgtatgttattgatggttacatttatcctacggaagtaaaagtgggaagtacttatactaatttgggtgcggaagcgtttaacaacttagatccatcagttgtggaaagtatttctatcttgaaggatgcttctgcagcagtttacggtgctcgtgcagcaaatggtgttattctggtaaccacaaaaaagggaaagttaggtgcgcctaaaatttcatataatggaacatttggtattacagatgaagtatctcgtcctaagatgttgaatgcgtatgagtatggcaagttatggaatgcagtacgtatggctgacccgacggagacaagtattgatccgttaagagctatttttcagcaggatgagttgaatgccatgaaaagtttgcactatgatttactggataaatattgggaatccgcattgacgcagcagcatagtgtaaacctgagcggtgctactgaaaaagccagttattttgccggaatttcttattttgatcaggatggtaacttaggtaagctggattacaatcgttggaattaccgtgctggtgtagatgtgaaaatcagcaagtggataaaagcgaatgtacaggtctccggtgattatggaaagaaaaatactcctctgaatcaggtcggaggttcgtctgcagagaaagattacaatacgctgttgacacatccttattatattcccgaatatgtgggtgaatatgcggtagctgcttacggtcctactaattcatcggtaagtaatattcagaattacaatttcaatgtacttcagaataatggcgactataaacgaaacatgacatcaaacatgaatattaatgccgggttggaatacgatttcggatggaataaatggttgaaaggactgaaattgaagtttacttattcgaagagtgtcaatacgaataagacaaatgattatggtacttcttataatctttattatttggagactcgttctggtagtggagaacatttgtatactccaattgaaggagcggataacagtgcatttgaaaatactagtttttatttggcaaatagtggaaaaccggtggttaactccagtacaagtgatattactggatatttgtctcgttccatgactcgttcggataactatcagatgaactttactgcagcatataatagggatttcggactacattctgtaggaggtttattctccattgaaaagtctgaatcagaaacagaatatttgtacggtatggttactaacccatacgaatttacgacaggacaatctaattcggtagactggaatagtactcctagtacagaattcactcgttttgagtcgggtaatttatcttatatcggtcgtttgaattattcttatgataacaaatatttactggagttcctgcttcgttcggattcttccaccaagtttgctcctgaaaattattggggatttttcccgtcagtatctgctggttgggtggtttcacaagaagaatggtttactaagaacgttacatggattgattacttaaagttgcgtgcatcttttggtttgaccggtcgtgataatacaacagcatggcaatggttgcagacttacggaacagataaggataaagggccagtatttggcactagtacagaggccaatgccggtagtcacctcacaatgaataaaaacaatgcagcaatcaatcgggatgctcattgggataaatcttataaaggtaatttggggcttgatttcaatgttctcgataatcgtttatcattcaatattgacgcttactatgaatggaaccgtgagatgttgcttagttataatgcctctgttccatctacagtgggagctaattctgcgaaagtgaattatggagaattgaatacttatggtatcgaactgtctgctacatggagagacaagataggtaaggattttaagtataaaattcagttgaacaccgggtatagtgataatgagattttggtaagagactgggatcagaagcctacttataagagctataagaagggtgatcgtttggatcaaggcatctggggtatgcagtgtatcggtatgttccgcagctatcaggatattgacgagtattttgccaagtacaatattacttcctatatgggtaacgttaaagaagatgtaaaaccgggtatgttgatttataaagacgtgcgtggagccagacaagatgatggtacatacgccggaccggatggtgtggttagctctgaagatgaccaagtacggttatctaatcgaagcaatccttacagcatgacaatgaacctgaacgcagaatggaaggggctttctttgacagctcagtttaatgcgagctggggtggttatagtttcttgcctgatgatgcaatttctttaggaaaccaaggaacatcggctaataagtataatgatttggaatatgcaaatatgccttcgttctggactacagacaatatgtttgtgtataacgatgtagtagatgcagcaggtaatgtagtggtgaaagccaatcgcaatggtaaatatccgaacttgagatggggcagcgtgaatgcagtaacttcttctttctggagagtaagcggaacacgtgtcaaactgaatcgcgttacattagcttaccgtataccgtcaaaatatacaaaaatgataggtatcgaaagttgccgtttcaacattacaggacagaatctattaagtttctataatccttatccggataattttattgatccgatgactacttatggaaattatcctacactgcgtaaattcacgattggtgtcaatttaacattctaaaagaacagtaaaatgaaaagaaaaaatatattccgtatcagcgtagctttttttgcaatgacggcgtttacttcttgtagcgaccagttcatgcaagacaagcagaactttgacagcactactgccgatgcttataattattggagtggtgcactgggacgtgtggcagacgtttatagagtatgtttgccagaccctaaggctactcccagttcaatgtataacagtaccggtttagcagacgaccaatctaagtcgactgaagaatatagtggattcagtgcttttgtcgatccactcaagccgttgacttatcaaaccgggaataaccctgtacctgattactttgaaggtacgaaaggtgaccctataacttccgcttacggacgtattcgtaatattaatgatgtcattgcaggcattgaaggaagcacgctttctcaggaagaaaagaatgagttgttggggcaggtttacttttttcgtgcatggtgctattataatttggtgaaatggtatggtggtgtgcccatcattacggaagtacaggaacctgttgaaagttctgttgttccccgttcttccgcaaaggattgtttcaaatttatttgtgatgatttggagagagctgaaacactgttagcaccttttacgggagccggacaatggatgtcgggtgataattacggtcgtgttacttccggtacagcagtggctttgttgggtcgggtacgtgtactatatgccagtccgctatttaatcgctccaatgatttgtcccgttggacacaggcttacaatgatataaaaagatctattgacgtgctggcggctgccggatatggtttggctaatgaaagtaatcccggtgtgaacgcttccggttgggctagtctttttactgaagtgccgagtcaagaagctgtatttgtaacgctccacaacacgctgacggaaggagttcctgattatcgtaaaaataatacgtgggaaaatggcatccggccgtacaatgctagaggaggtggtggtaaaacgccttccgctatgttggtagatatgtttcctatgtctgatggtaagatacctgcaacttgtgaaacatacactacgttaactaaatcagatatagcttattatcgcgaatttcctttcgtcgatcgtgatccgcgtttctatcgtacattcgctttcccgggagttcgttggtcgtttgtcggcaatcctacgacacagggaaaccgatacccgcacaatggtcctgattatgaactttggaactatacctggtatacagatgcagcttatgtagatgatattgaagctaatagcagtgtgacctatggcgccgatggtctccttaatgatgtaaaagggttttatgtacgtaaacgctctgatgacagagatgtgaatgcaactgcccgttatgtctatgatgaaaagtccgggggcttcacacgttctgccgcgccgtatatggagattagatatgcggaagtattacttaattatgcagaagcagcatgtaatgcaggtgagatgggagttgccgttgatcaattacaaaaaatccgtgctcgtgttggttataaagctgaaaataattatggattggaagctggtttggatggtgaccaggctaaatgtatggcggccatcatgtatgaacgtcaaatcgaactggcatacgaaggaaaacgtttcgatgatatgcgtcgctggatgttgtttgatggcggcgtagaacttcctgaaggtgcgcctgttacttggaaactgactggctggggtggaaacacatgtacatatcttggctttaagccactcaacggacaacgtcgcgagaatcttgaattccgtacaactgtaaatggtggcattggtggaacaaacgttgacaacgatccgttagtaaaagctggaattacccgtccggctgcaatggatttgagaaaggatcttgccggcgaacaggataggctgaaagaattttattcaaattatttgacccgtaagacaaagaaaggcgactcttatgatgatagccattctccactgtatatctcgttccttccaaggtattatatccttggtttctcccaaggtatccagggtaacaatagtacattactgcaaaccatcggctggggagattacaacaacggtggcgcaaacggtactttcgacccgctggctgaataaaaatctcaactcccttcgatataattatccctgcatttcggtgcagggataattacatcggagatgaatcacaggggatgcttcggcatcgaaaaccatagaaattcaccggttcctccctcttttctttgagaagacggcaggaattggtgaatttttgttagttaaatcagctgattttagttatctttgcctttgcaaacttctcaaaacgcttccccgagcctgctaaatgcctgcaaacttccagaaacgcttttccaagcttgtaaaatgccggaaaacttttaaaatcgcttttgtaagcttgaaaaacgcttgcaaattttaaaaaatgctttcacaggtatgcaaaacgtccgcgaatttacagcaaccatttcgtaggcttgtccggatttcgaatttttcagagatagatagaacaagtatgaattcctaaagaaaaaattatgggaagttatcaaaaagcagacggtatcacactgtcacagttgaacaacaccgagtacaccaatttcatgaatcgtgtgctggcactcctcaccacaggcagtatctccaaactaacagtaacaaacatcgtgaacagcatcaaaccgaggttggcacaaatggaagacctggtgaaccgttccatggccaatgccgaaacaaaggatttactgaaattggacgccgaacgcgattcgtatgtcagttatttattggctactgtccgtgcagctaaaaattcaccgttagcagcgcaacgagacgcatacaataccttagaaatcacggtgcgcccttataccggactggcacgcatgcgcaatatggaggaaacggcagccatcaccggactgctgcttgacttccgcaaggaagccgtgaaagccgccgttacggcacttaatttggatgccatattgacggcacttgaaaccgccaataaaaactattcggctctgacggacgcccgttccgccactcgtacggcagaatcgactgcggactcaaagactgtacgcgcgcagctagattcgctctacgatgacttggtgatgcacgtaactgcggtcaatatactgactccctctataacggaagcttcagcgtttctaactgctctcaaccaagtgataaccgaaacaaaagctgcctatgatcgtcgtaaaggcattacggctccatcaaaaccatccggtggcggcgaagctcccgatccagatggaggcggtggggtaactcctccctccggtggcggtggaagtggcgaagctcccgatccggcagcttaacggccatcaatagatgaaaaaacgaaaaagagggagtttgacattccctctttttgtatcaattcaacagactgaatctgcaagtgatttcaactgctggtccgcatgagctacagccccttttctttcttcgattttactttgcgcagagaaacagccggcaggaaaaaacatttaagcaaataatccactttatgtgattacaaactatctcttttttcgtcctattcatgtatatttgaacttacaatagtagaaaaacagataaaagatgaagaaaagacaagtatttttggcagcatttgctgcaacgatgctgattcctgccgtcgcatgggcgcaatacccgcaaatcacggaggaagcaaaagcaaactatacgaaaatgatgaccgaagagcggaaacgctctgacgaagcatgggcaaaagccttgccgattgtacagaaagaagccaaggaaggacgcccgtatatcccttgggctggccgcccctgcgatttgccgcaagccgacattccttcatttcccggagcggaaggcggaggaatgtacagtttcggtggtcgtggcggaaaagtgattaccgtgaccaacctgaacgaccgcggacccggttctttccgtgaagcctgcgaaacgggtggggcacgtattatcgtatttaacgtggcaggtatcatccgtctggaatctccgattattgtccgtgcgccatacgtgaccatcgcaggacaaaccgctcccggcgacggtgtctgcattgccggagaatcgttctgggtagacactcacgacgtagtggtgcgccacatgcgtttccgtcgcggagaaaccaaggtatggcaccgtgacgactctttcggagggaatcctgtgggcaatatcatgatcgaccattgctcctgtatgtggggactggacgagaatatttctttctaccgccacatgtacgaccccagcgaagggcaatataaaagcacggatctcaaactccctaccgtcaacgtcaccattcaaaacaccatctccgccaaagcgctggatacctacaaccacgctttcggaagcaccttgggaggagaaaactgtgcgtttgtccgcaacttatgggcaagcaactccggacgtaacccttccatcggctggaacggagtattcaatttcgtcaacaacgtagtgttcaactgggtacaccgctcttccgacggaggtgattacaccgccatgttcaacatgatcaacaactactacaaaccgggacccgccacaccgaaaaactccaacgtgggacaccgcattctgaaacctgaatcagggcgcagcaaactggatcatcacgtctacggacgagtgtatgctgatggaaacatcatggaaggctatcccgaaatcacgaaagacaattggaacggaggtatccagattgaaacccaacccgacacggaagggtttacagaaaacatgcgcagctaccgtccgtttgaaatgccctatatcaatatcatgggaacaaatgatgcttatgagtatgtgctcaatcatgtgggagcaaacatccctgcccgcgacatcatagacgaacgtgtggtggaagaagtcagaaccggtattccttattatgagaagaaacttccgaaggatgcttatggtgatttgactggtttgtctcctaaatcaatgggtgaagacggacaattcaaatatcgtcgtctgccgaaagattcatataaacaaggtattattaccgatattcgtcagatgggtggacatcccgagtataagggaactccttatgtagatacagatggtgacggtatgccggatgaatgggaaaaggccaacgggctgaatccgaacgatccgagtgacgccaatgaagattgcacaggtgacggatacacgaatattgaaaaatatatcaatggtatcagcacaaagcataaagtagactggcgtgatttgaaaaacaactacgatactttggctgaaaaaggaaaattaatgtaattcggcaggatgccggtgaaaaaactagccccggcatcctgtctaaaaaaaaacaatatcaatgaaaaagatattaatcgtttctctactgttgctttgcggctggatgtctgccggggcagttgacttgaacaaagagaaccgtgaccccaagtatgtggagtccattatcaatcgttcgcagaagattgtcgataaactcggacttacagatgcgaaaatagccgaagatgttcgcaatgtcatagccaatcgttacttcgaattaaatgatatttatgaagtgcgggatgctaaaatcaagaagataaaagaatctgggttgaccggtgaggctaaaaatgaagctttgaaagccgcggagaatgaaaaagatgcagcgctatatcgttcacatttcgcttttcctgccaatttatctctctttcttgatgaaaggcaaatagaagccgttaaagatggcatgacttatggagtagtaaaagtgacttatgactcacatctggacatgattcctactttgaaagaagaagaaaaagctcaaatctatgcatggttgattgaggcccgtgaatttgcgttggatgcagaaaattcgaataagaaacacgctgctttcggaaaatacaaaggacgtatcaataactatctggctaaacgcggatatgatctgaagaaagaacgtgaggaatggtataagcgtgtaaaagcccgtggaggttctctataattaaaaaataagatactataaaaagaagtgaaattctttcccattgtaaatggttagtttgtttgatggtggaaagggtggctcggagagtcgcccttttatcgtatataaattttgaatctactgattcttctagtatatttgagtacaaatggcgctttccatcgtctcctctgtataaaagatacaaatatagaatatacaaatgaaaaagttaagaaatacattagccgcaataagtcttctgtttctggcttcttgtggggggaacaaagactactacatgttcacttcgtttcatgaaccggctgatgaggggttgagatacttatatagtgaggacggaattcactgggacagtattccgggagtttggctaaagccggaactgggacagcaccagctcatgcgggatccctcgatggtacgtactccggatggaacctaccatttggtctggactacaagttggaaaggtgatttaggatttggctacgcacattccaaagatctgatccattggtcggaacaacagatgattcctgtaatggcagacgaaccgactactattaatgtatgggctccggaaattttctatgacgacgagaacgatcagtttatggtagtatgggcttcctgtgtccccgggcgtttcgaaaaggggatagaagaagagaataataatcatcgtttatactatatcactacaaaagattttaaaaccgtttcgaaagcaaaacttttgtatgatccgggattcagtaccattgatgccgttatcgtgaaacgggcaaagaatgactatgtaatggtactcaaggataacacccgtccggaacgtaatctgaaaatcgctttttccgattctatgaccggtccttattcgcccgcatcccagcctttcactgaatcctttgtagaaggaccgtctgtagagaaagtgggagacgattatctaatctattttgatgtatataagaaaaaaatatatggcgctatgcgtacgaaggatttccggaactttacagatgtaacagaagaggtaagcatccctgtggggcataagcatggaaccatatttacggctccggaatcagtcgtaaaagcattgctggaagaaaagaaataaacccggaaacaattttaaatcagaataaatcatgaacaactctgctaaaattcttgttgtactggctgccggttggttgactactacagcctttgcacaagatagaattcattatacaggaaaagaattatcgaatcctgcttgtcacgacggacaactgtctccggtagtcggagtacataacattcagttggtacgtgccaatcgtgaacatcccgatgcttcgaacggcaatggatggacgtataatcatcagccgatgctggcttattggaatggacagtttttctatcaatacctggcagatccttctgacgaacacgtaccgccttcacagacttttctgatgacatcgaaggatggatatcgctggacaaatccggaaattgtgtttcctccttatcaagttcccgatggatacaccaaagagtctcgtccgggtgtgcaggccaaagatctgattgccattatgcaccagcgtgtcggattctatgtttctaaatccggcaagctgattacaatgggaaattatggagttgctttggataaaaaagatgatcccaatgatggaaacggtattggccgggtggttcgtgaaataaagaaagacggttcttacggaccgatctatttcatttattataatcatggatttaatgaaaagaatactgattatccgtattttaagaaaagcaaggatcgtgagtttgtgaaggcttgccaggaaattcttgacaatccgctgtatatgatgcagtgggtggaagaagccgaccgtgaagatcctattctcccgctgaagaaaggatacaaagcattcaattgttatacattgccggatggacgtattgccagtctttggaaacatgcgcttacctctatcagtgaggatggcggacatacttgggcagagcctgtgcttcgtgcaaaaggtttcgttaatagcaacgcgaaaatttggggacagcgtttaagtgatggtacatacgctactgtatataatccgtcggaatttcgttggccgctggctatatctttgagtaaagatggattggaatatacaacattgaatctggtgcatggtgaaatcactcccatgcgttatggaggaaattataaatcatacggtcctcaatatccgcgtggtattcaggaaggtaatggagtacctgccgatggtgatttgtgggtttcttacagtgtgaacaaggaagatatgtggatttcccgtattcctgtcccggtggaaataaatgcttcagcacatgcggatgatgatttctctaaaaataaatcaattgcggaactgactgactggaatatttattctccggtttgggcccctgtttctttggaggatcaatggttgaagttgcaggataaagatccgtttgattatgccaaagtggaacgtaaaattccggcttctaaagaattgagagtatcatttgatttgaaagccggccagaataataaaggcacactccagattgaatttctggatgagaatggaatagcctgttctcgtatggaacttactgatgatggcattttccgattgaaaggcggctcccggtttgcaaatatgatgaaatatgaagcaggaaaggtttatcatgtagaagcagtcctttctactgttgatcgtaatattcaagtatatgtagatggcaagagagtagggctgcgtatgttctatgcgcccgtggctgctgtggaacgaattgtattccgtactggcgtacctcgtacattcccgactgtagatactcctgccgaccagacttatgatctgccggatgcaggtgcgcaagatccattggctgaatatggcattgccaatgtgaaaacatcttccgcagataaagatgcgtcttctgctcttttaaagtatgctgacttcagtcattatgcagattgtttcaatggcatggaagacgaaaatgttgttcaggcaattcccaatgcaaaggcttcggaatggatggaggaaaatattcctttgttcgagtgtccgcaacataactttgaagaaatgtattattatcgttggtggtcattgcgtaagcatatcaaagagactcctgttggctatggtatgaccgagtttctcgttcagcgttcttattctgataaatataatttgattgcctgtgcaattggacatcacatttatgaaagccgttggttgcgtgatccgaaatatttggatcagattattcatacatggtatcgtggcaatgatggcggtccgatgaagaaaatggataagttcagctcatggaacgcagatgctgttttggctcgttacatggtagatggtgataaggactatctgctggatatgaagaaagatctggaaaccgaataccagcgttgggaacgtacgaaccgtttgaagaacggattgtattggcagggtgacgtacaggatggtatggaagaatcaatcagtggcggacggaggaagaaatatgcccggccgacaatcaatagctatatgtatggcaatgccaaagcactttcatgtataggaattctttccggtgatgaggggatggctatgaaatatggcatgagagcggatactttgaaaaatctggtagaaaatgaattgtggaatacacgtcatcagttttttgagacgatgcgtacggactcttctgcgaatgtgcgtgaagcaattggatatattccctggtatttcaacctaccggataccacccaaaagtatgaaattgcctggaaggaaattatggatgaaaaaggcttctctgctccttatggactgacaactgcagaacgtcgtcatccggaattccgtacacgtggagtaggcaagtgtgagtgggacggtgctatctggccgtttgcttccgcacagacattgacagcaatggctaactttatgaataattatccgcagactgtattgtctgacagtgtatatttccgtcagatggaattgtatgtggaatcacagtaccatcgtggtcgcccctatattggtgaatatttggatgaggtgaccggttattggctgaaaggagatcaggaacgtagccgttattataaccattccactttcaacgacttgataattacaggactgatcgggcttcgtccgcgtttggataatacgattgaagtgaaccccttaattcctgccgacaagtgggattggttctgcttggataatgtattatatcacggtcataatctgacgattctttgggataagaatggtgatcgttatcattgcggaaaaggattacgcatttttgtagatggtaaggaagtagggcaggcggatacattgacaaaaatcgtttgtgaaaatgcactcaaatggtaagttagagttcaccacagattacacagattattttcattttcgttgaatccccatagtgaattagggtattgatatacatatttatttaatctgtgtgaatctgtgtaatccgtggtgcctcttaaattcgaacgaataaaagatacttgaaaaatgaaattcaaaaagattcttctttcattgctaatttgtttgtcttgttttgtacaggcgaaaaatataaccatcagtcgtcttacctgtgagatgcaggaagggctggtagtggtcgaaagttcaccccgtttgggctgggtgatggaatcgccggaaaatgggacgcgacaatctgcctatgagattgatattcgggaagcttttacagggcgttccgtttggaatagtgggaaggtttattcttcgcagagccagttagtttctacaaagggggcagatatacgtcctgataactcatttaattatagttggcgcgttcgtgtttgggatgaaacagatacaccttccgagtggagcaatgaagcgaaattccgggcagtacccgaaaggttatcttcggggcagtggattggagctattacccgacaaaatgctcatttaccggaagggcgtaagttccacggtggagagctgaagaaaccggaagtgaaagctgcttgggaagcagtggacactttggcaaagaaaagtatttgtttgagaagaacattccaggtaggagatgcgaaagaagggggtgcaaaccgtaaaccgggcaagaaaatagtggaggcaacggcatacgtttgtggtctgggattctatgagttttctttgaatggcaaaaaggtgggtaacagtgagtttgccccattgtggagtgattatgataaaactgtttactataacacatacgatgtgacggaacaattgcggcgtggtgaaaatgtcgtaggaatcttattggggaatggattctataatgtgcagggggggcgttatcgcaaattacagatcagctttggtcctcccacacttttatttgagctggttattaactacgaagatggaacatgtacgacggttcattccgataataattggaaatatgattttagtccggtaaccttcaattgcatatatggaggagaagattatgatgcgcgtcgtgaacagaaaggatggaatcagattggctttgatgacagtcattggcgtccggtagtcatacaggaagctcctaaaggaatacttcgtccacagatggcggctccagtgaaaatcatggaacggtatgatattcaaaaggtaaccaaactaaatgcggaccaagttgcatcagcttctgtatcaactaagagaacagtcgatccttctgcttttgtgttggatatgggacagaatttggctggctttccggaaataaaagtacgtggcaaacgtggtcagaaagtaactttgattgtagccgaagcattgacagaggaaggtgcttgcaatcagcgtcagacagggcgtcaacactattacgaatacattctgaaaggggaaggcgatgaaatctggcaccctcgtttctcttattacggttttagatatattcaggtagagggtgctgtcttaaaaggacagaagaatccgcagaaattgcctgtattaaagaatattcaatcctgtttcgtatataattcagccaagaaagtttccactttcgaatcatccaaccggatatttaatgctgcccatcgattgatcgagaaagcggttcgcagcaatatgcagtctgtgtttacggattgtccgcatcgtgagaaacttgggtggctggaacaggtacatctgaatggtccgggtttgttgtataactatgatttgacagcatacgctccgcagattatgcaaaatatggcagatgcacaacattccaacggggccatgccgacaactgctccggaatacgtgatttttgaaggtccgggtatggatgcttttgccgaatctccggagtggggtggttctttggttattttcccttttatgtactatgagacttatggagacgattcattgattaagaaatattatccgaatatgcgtcgttacgtggattatctcaagactcgtgcagataaaggtattctttctttcggattgggagactggtatgattacggagattttcgtgcgggattctcacggaatacacccgttcctttggtggctactgcgcattattacatgacagtcatgtatttggtacaagctgcgaaaatggtaggtaatgactttgacattcattattacacttcgttggcacaggatataatggttgcatttaataaatgtttttttcataaagatacggcacaatatggtacaggaagccaatgcagtaatgcgcttccgttgttcctccaaatgacgcaggatgcagatgaacaagataactaccgaccggatgcagatttgaatgagaaagtattcgcgaatctgataaaagatgtggaagcacatggcaaccgtttgactaccggtgatgtgggaaaccgttatctgattcagacattggcgcgtaatggagaacatgaacttatttataaaatgttcaatcatgaagaagctcccggatatggtttccagttaaaattcggcgctacaactttgaccgagcaatgggacccccgtcaaggttcttcctggaatcactttatgatgggacagattgatgaatggttctttaattcactggtcggtattcgtccttctaccactctaaaacaaggttatcagaagttcatcatcgctccccaacctgtgggagatttgaaatatgtcaaagcgtcgtatgaaactttatacggtaccattaatgtggactggacttgtgagaatgggactttcactttaaacgtgtctgttccggtgaatactaccgctgttgtttatctcccgggcggaaaagaaccgaaagaaatacagagcggaacatatcaattggtttgtgcaaaataaaagaacctttttgtatatatttgtagaattaaaaaacaatgtattcgtataaaaaatcatgcagcatctttattttaatcatgtagcatgtttgaaaaaaacatctcaatgattgtcttcaaacattgggaagaaaaaaagattctattagcatgattttttagaaggaaacgatgaaatatactttaataatatcgattatgaatttacgaacaactctttttgtctttctttgcttctgtgcaaccacagttcttcgtgccgagcgtgtagatatgctgaaggccggtgcaaaagcaaatggcaagactcttaatacaaagctaatcaattcaacgattgaccgtctgaaccgtggcggcggaggtactcttttctttcctgccggaacttacctgacggggagtatccatctgaaaagtaatattacactggagttggaagccggagctaccttgctcttttccgataactttgatgactatcttccttttgtcgaggttcgtcatgaaggagtgatgatgaaaagtttccagcctttgatttatgcggtagatgccgagaatattacgatcaaaggagaaggaactttggacggacaaggaaagaaatggtggatggagttctttcgtgtcatgattgatttgaaagacaatggcatgcgtgatgtgaataaatatcagtccatgtgggatgcagcaaatgatacgacagcaatttatgctgaaacgaacaaggattatgtaaatacattgcaacgtcgctttttccgtcctccgttcattcagcccgttcgttgtaagaaagtaaagattgaaggagtgaaaatcataaattctcccttctggacggtcaatccggagttttgcgacaatgtaactataaaggggatcaccatagataatgcgccctcaccaaatacggacggagtgaatccggaatcctgccgcaacgtacatatcagcgactgccatatatcagtaggagacgattgcatcacaatcaagtcgggaagagatgcgcaggcccgtcgtttgggagtaccttgcgagaatatcactatcaccaactgcaccatgctttccggtcacggaggcgttgttatcggcagcgagatgagtgggagtgtgcgtaaagttactatttctaattgcgtgtttgacggaacagatcgtggaatccgtattaagtcgacccgtggaaggggaggagtcgttgaagatattcgtgtcagcaacgtcgtaatgagcaacattaaacaggaagctgtcgtattgaatttgaaatacagtaaaatgcctgtcgaacctaagagtgaacgcactccgatattccgtaacgtacatatcagcggaatgactgtgacaaacgtaaagactccgatcaaaatagtgggcttggaagaagcgccgatatctgacatcgttttgcgtgatattcacattcaagaagggaaacagaaatgtatcttcgaaaattgtgaacgtatcacgatggatgacgtaatcgtcaatggtgaagtaattaaaagcaccacaaatactacagattaacacagatttttaattcgactaaattataagaataataaatctgtgaaaatctgtgtaatctgtggtgaaaaaacaacttacataaattaaaaataaatgaaacgaatcctttttactatgcttcttgccgcatctctttcggccgaagcccagacgcaaacatacgagacggaatttgcccgtcccttgaatgaagtactgacggatatacagaaccgtttcggagtccgtttgaaatatgacattgatacggtgggaaaagtgctgtcttatgccgatttccgtattcgtccttattccgtggaagaatccttgacgaatgtattggcacctttcgattataaatttgttaagcagaaaggaaatatgtataagctgaaagcatacgagtatccacgtcgtacagatgcagacggagagaagatgctggcttatctgaatacactctatacagaccaacagtcctttcaacttcgtgccgattctctgaaaaaagaggtacgtcagcgtttaggtattgatactttgttggctcaatgtgtcaaaaccaaacctattctttcaaagatacgtaagtttgatggctataccgtgcagaatttcgcacttgaaacacttcccggattatacatttgcggttctatctatacgccccaatcgaaaggaaaacatgcgttgataatctgccctaacggacattttggtggcggacgttatcgggaagaccaacaacaacgtatgggaactttagcacgtatgggagctgtttgtgtagactatgatttgttcggatggggagagtcggctttgcaagttggcagtgcggcacaccgtagtagcgcggcgcacactattcaggcaatgaacggcttactgattcttgactacatgcttgcttcccgtaaggacattgataccagccgtatcggtacgaatggcggttcgggtggaggtacccatactgtattgttgagcgtattagatgatcgtttcaccgcttcagctccggtagtgagcctggcttctcacttcgacggtggctgtccctgcgaaagcggaatgcctattcaactatctgcaggaggaacctgtaatgcggaattagccgctacttttgctcctcgtccacaactgatcgtatcggatggcggcgactggacggccagtgttcctactcttgaatttccttatctgcaacgaatctacggattctaccaggcaaaagataaagtaacgaatgtacatcttcccaaagagaaacatgactttggcccgaataagcggaatgctgtttatgacttcttcgcagaagtattcaaattggataaaaagatgttggatgaaagcaaggtcaccattgaaccggaatccgctatgtatagttttggcgaaaaaggagctttgcttcctgaaggcgccatccgttcttttgacaaggtagctgcttattttgacaagaaggcttttgctaatttaaaatcagatgcttctctcgaaaagaaagccatcgactgggtagcttctttagagttgaacgatgataaaaaagcaggttttgcagtaactgccatttataatcatcttcgtaaagtgcgtgactggcacaatgagcacccttatacaacaatccccgagggtatcaatcccctgacaggcaaaccgctttctaagctcgaccgtgaaatgattgcagattctgctatgccgaaagaagtgcatgaaaggctaatgaaagatttacacagagtattgacggaagaacagattgaacaaatcctggataaatacacggtaggtaaagttgcttttaccttgaaaggttatcaggccatcgtgcccaatatgacggaggaggaaacgacttttgttctggaacagttgaaactggctcgcgaacaggctattgactacaagaatatgaagcagatttctgctatcttcgaaatttataaaaccaaatgcgaacagtatttcaatgagcatggtcgcaactggcggcagatgttcaaagattacgtgaataagcgaaacgcagaaaagaaggctcaaggaaagaaataaatgagggtaaacccttaacctcctacataaccggaaaatctccgggataatagaagaatataatagagctatgctttgcaactgacaaagcatagctttatcatatctaaagctatgctttagttcccctaaaacactgctataatttatttcttcacgattactaaacatctttttcgcagaaaatgtgttattttgtagatggctaacagaaatgtatatgatatggataagcaaaaagtagcattagtcctttccatgggtggagcacgtggaatagcacatataggagtaattgaagaattacttcgtcacaactttgagattacttccattgcaggaagttccatgggagcaatggtgggagcaatgtatgcttcaggaaaaatggaagaatgtaaagaatggctgtatagttgggacaaacgcaagatgtgggaattggcggatcttaccttaagccgggatggattagtgaaaggtgaccgttttattaaagaactgaaacaaattattccggacatgaatattgaagacctgcctgtcccttatgtagcgatggctacggatattgtccgcgatcaggaagtcaggtttgacagagggagcttacatgaagctattcgtgcgtctatttctatccctatgcttttccgcccattaagaaaagacggtatggtattgattgatggaggtattctgaatcctcttccattgagtcatgcgcaacgtactgaaggagacattctgatagctgtcgatgtgaatgcacccattgaaatcggaaagaaaaagaaaatgtctccttataatctgttgacagaatcttcgagaatgatgatgcaacaaatcactcgttaccagatagaacgttgtcagccggatatcttaattcaaatttccggcgatacgtatgatatgttggagttccatcatgctgcttcgatagtgaaaactggagtggaagttgctcgaagaatattaatgcaataaatagtattcattaaagtgatagatttttattcaatataaatcatctttttcgtcattcccccgtcaatcgtgatgttttctccattgatgaaatcattgttttcctcgcagagaaacagacacatgcgggcaatatcttccggtttacctacccggcgtgaaggatgctgtgaatggtcttccggttggagttgattataatcatgggtctgtatccatcccggagcaatggaatttacggtgatattccattcggataaagacaaagccaatgcatgagtcaaagaatagataccacctttcgaagctgcataaccttcacttcccggttcactcatcagataacgtgtagagcagatatttataattcggccgtatgggttgggagagggctgctttttacgatggatggcaagcagccgggaagtgatgaatacaggacgcaggttaatagaaagaattttgtcgaaatcctctacacttgtttctgtgatagaagaaaatttgctgataccgacgttgttgacaataatatcaatatcgttccattcggcaagaatggtttgcatacaactttcaagtgcgtttttatcacttacgtcgaccttatggaacatagccccggttgccttcgcagtctcctgtcccgatgtttcgtttatatcacaaaaggcaacttgatttccagctaggcaaaaagcttctactattgctttgcctattccttccgctccgcctgttataaatactcttctttttgaatcctccggttttgaaaccgttgaagtgtgagacttcgattcagccggacgtactgctgttagtttcttcttaccatatttttgtgcttgtttccaagcagcttttcgggcttcgtattgttcctgttgtctttctatgtaattatctgccatcgttattttttatttattggcaaatgtaaagtataaaatggataaatacaagaatcgaccgctcttttgcgggcaaaggagcggtcgatttcattcagatgatcgttcaatatttaaaacttcgtcggatctatctctgcatatttaattcgttgacgacgccatgtataaatggcatgcagcttcccgtctttcccctgaataatgctagggtaagagtattggctgatcggactatcttctaatgtaagaacaggctgccaattgataccatcttctgaaacggccacacagagcggagtacgcggacctttcggagttccgggcaatgtagagaaattattgtagataaggatatgtctaccgtctttcattgtcacggcatccgtaccggaattattattcgggacatccagcaacgtaactttactccatgtgtcaccattatcactgctccacgcagttgctacctgtgcgttacgtgtacggcagagtatctgtaatcttccatccttatgcttcaaaatactgggttgtattgcataaacaggtttggctccttctccttcgatcgcttctccgccttcctggtcatccacattcacacctccctttttacgattttgggtggggacagataactcggcatccagtggtccgaccatcttccaggtcttgcctttatcatcggaaatctcgaaatggacacgccatccgttacttccttccgtactggaagggcagatgatacgcccattgatatattccggtttattcttaataggtccaagaaaacctttcggaagcgcttcgcgtttgctccaggtttttcctccgtcgcgtgaacggacaagccatcctgtccagtcgctcactttcaaacctattttataaaacagaatcaggtcacctccgggaatctggaaaagaaccgggttccagcaagcttttctgcgggcaataagtgttccttttgcatctttcaccggggtacaggttgaatcgattccggccaatactgcttgtgggtctttgagtgaaaacacaccgtcggcagcaagtttgggggcggtccattctttagagcctttaggtttacgacatacccagatgcaacaatccggattgcgctctttggttcctccgaagaaagaggctacgagatcaccatttttcagctctactatcgtagctccatgacattcggggaaagaagcgttttcatacagaaattcatcagtcagaatagccgtattccgggtgggaatgtctacactgaaatgatattttcccgaaccgattttttctttccgtccatccggaagatgtacttcccccgtcgtattggcgggaagttcgatatcccattccaaatgtgtgggagtctttgtccatcggctggttatttttccgtagatactcatgtacgatgcatccacgttactcaactcctgaatttcaaaagccggctggaagacgatatgcttgtaaccggacttccagcggtccgcacggatacctgctaggttattgaagcaccaaggcaataaatcacctaaaagcatcacgtgattaccgctattcatttcaggatttgccgtatcaccgttccataactcccaaatagtggtagcacctttttcaaccatatatccccaggaaggatatgttttattggtagccagtagataagctacattggcatgaccgcgacggctcaattcacgcaatagccattgtacaccgattactccggtacttatatgtcccttgttggttgtaataatggaagttacggcatttttagctacttcattgatgtagttctttggcactagaccaaaagcaagtggcaagatattggcagtaactgtgttgttaccatagaaaatactgtccggatataaggtatgtcccggtacgggagaagtaccttcttttatgtgtagaaaacgggcattgaatgcgtctttcatgcgatgttccaaatcttcccattcttctgcgtcagctttcagcccttgcaggcttgcaaagcggtgcatcagttgtaatacctttagataataagccgttgcgatcaaagctccgtcagtcttgcgggaagggtccttactatgaattaactccagtgattcgggcggaacgcaccagtcaccatatttatctttggtgatgataaaatcttctgtcatgtagtattcccggatatgagatacccacttcttgatagccggataattctcttcgatcggacgtttatctccaaagtttgtgaaaagcatgtcgcaggccattggtaaagcggcaggccaggtcacattgtccgagtagtagttccagtatgccggggctacatcaggaatacagccgtcttcccgttgtgcttcgcggatgtcacgcgtccatttggtatacatggcgtaattatcgaaaagcatgctttctccccaacagcccatggtacggtcacccaaccatggttggcgttcattccgttgcggacagtcaaccggcatccctttatagttgctccggattccccaaaatgcattacggataatcttattcagagtttcgtcagaacagttgaaagtaccagtatgctccatttcatcttctactacttcggcaacgaaatcttctgccttcgcattcggataaccgctgacttctacataacggaacccatgataaataaaacgaggtgcccaggtagcatcttttgtttcgcgtccgctgacaacatatacatctgtagaacgggcatccctgaagtttcttgtataaagttcgccattgtcttgcagactttctgcaaaacggagacggatgctatcgccagcctgtccttttatccggaaacgtacccagcccgccatattctgaccgatatccaggatatatttgttaccaagctttttaatagaaacgggcttcagggtttctgtaactttcatgcccggcatcatttgtgcgcgcaatgttcctgaaggaatactgacacgttgggccggcatccagtttttgtcatcatatccggtttgagtccaggctcctagctctttacgggcatcatattcttcgccatcatattcattattgctacggataggaccttcagtagtcaatttccatgaagtgtttgtagcaatcgtttctttgctgccgtctgcatattccacaatcagattcaaccggagtttaggataaccgaaagtcggtatcttatacggtttatagttctgacgcatcgtatagaagcgaccatttccaagagttactccaatagcattttctgtttgaagcagtgaagtaacatcgtatgtgttgtacagaattgttttccggtagtcggtaggagcaggtgccagtacttgattgccgatgcgttgtccgttgataaacaactcgtacaatcccattccggcgatatgtactgtggcacgtttcacacttttctttactgcaaactctttacggagataacgggctgccaaacggctccattgtgtttcgctgtctccgggagcggccctgtccaagccgatccattgcccttgccagtccgcttcattaaatagtccggtggtccagaaagccggagcactccaatttgttgcacctttgttggtgtctattttcactttccaatagtaggaggcattacattttaatgtttttccctgataagtgatccattgggaagcgtcagattcaatctttcctgaatcccaaatatctccttttccttgttccaatagctccggggaagatgcgacaagaatgtgatacgcagtttgtatcacattctgttcatccgattcgatgcgccaactcaatcggggttggcgcacatcgatacctgccggatttttcaactgctccgttcgcaggtcagtgatacctatggctgcgtatagtgaacctgcaaagagcagaagaaagaaaaatgatactattcttttattcataagtatgttctcataattcgtttatataataaatttaggcacggattgcacggattaatgctgttgttttacttatctgtcattctgaaaaccgtaaaatccgtgtaatctgtgcctaataatacaaaattatttagcccatttttgttgtgcatttggtaattctgtccaggccttctccacatagttcttactactatccactacaatcagaatatgatcgtttccactgcaataaccactgtcgtgctggaatttgtgcactccgttatcaaattctccgatgtattccagtttaccatctttcgtggtgtaccaccaagcattctttttcgcgccgctaatcttgctgaaatcaacttctatcggacgtccggtatagttgtataccatcagataatcatttccacgtgtagcgatagcgcggtcataacgttctccattctgtcctgtgatgatagactgatcgggtatgcgttcaaagaacgggaaagtcaacatcaggtttttcagatacttcatctgattgtagcccggatcattcaacgcatcataccaaggtttctttgcaccataagcaccacctacacccggtttgataaattgcatgatggaattatgaccgtaagtatgtccgaaagaacctgcaaatacagaccaataagcataacgacgtacgtcataatccttccacaacagttcgttttcatcgtgcagaccatgaggtatttcttcatagatcggttcaccgtcaatcacaggcttcatgggtttcatggccaggctgcgttctacaaaacgccagttatcttcttccgtattttcttcgatagggtagtcaccatctccgaaacgttgcccgtagcgacgatgtccgctttgaaacatgttgaaatccaaccagggagcgttattgaaccaagttgcggaagttgttcttccacgtggatggaatgtcatcaggtgatttttgtcgatagctttgatagaggttgccaaagcttcccattcagcagttttcacgtcgccacggatatctccaccgataaaccagataatattcggttcgtccttataacgctctgccaaaaacttgccgtatgcttttgcctgttctacagtcatctcgccccggttcaccgggcttccccaaatgcagaccatgccgatatactgacctttcttggctgctgtacggataatgtaatccatgtgatcccaataaccgtatacgcctttttgattgatgtttttgaagttgtatccgtcaatcatcgaatattgtccgtagatattcatagacggaacattattcaacgtttgaacctgaatcacgttgtatccacgacgtttgcattgttccaggtaatattcggcttcatcccggttcaagcgttcaggcaatagccaaccggtttctcctaaccaaaagaaaggagcaccgttttcgtgtttcaggtaacgtccctcttcggaaactacgagtttgccgttgtcccaggggatatacgtcttttgtgttttcttctgtgctgcagccgaagttgccattgtcaatagcagcaacaaaaggggaagaatcttgaattttctcattgtattttatcgtttttagtttattttttagtcattttctcatactcaatagcagccaagatgaatgaacctaccgatttcggatcattttctatgatcggttcactgatataatactcaaatgagccgtcacgatatctttttgaatctccgcccaatcctgcaacagcacagcaattggtaattgtatagctgccatcctcttccaaacgggtaaatgtctttaccattccgtcaaaggctttttgtgtcggttcgatatactcgttgccaatatatcctttattgatagctttggcaagcgtatagataaacagggcagtggcagatgattccaaataattaccttcacgtgctccctgatcggttacctgataccaggttccggatgaaggatcttggtatttcacaatcgcttttgccaatccctgtagaatttgtataatgctgtcacgtccggctgtttcctgtggcaggaagtccagtacatctacaatagcagctccataccatccgatactgcgactccaaaaattaggagaacaacctgtttcaggatttgaccatttctgttcgcgactttcatcccatccgtgataaaaaagccctgttgcaggatcataagtcttgctatttatcaaaagaatctgttttgttgcttcgtcaaataaagcgggctcattaaaagtagcaccatattgaaccagataaggagaagccataaaaattccgtccagccacatttgatgaggatatctcaatttatgccagaatcctccctcactggtacggggttgctctgccatttgcttgcgcaaagtatccatggctattttgtaacgttcgtctccggtctgtgcgtaaagatcgaaaagaatctttccgccgttgacattatcaatattgaatgaaagatatttcatggttttgatatgtccgttagcatcgatcagactatctgcatatattttggcatactcataatatacgctgtccccggtatgtttccattcttccaacatggatttcactactaatccgtgggtatatccccagcgtggttttttagctttttcaatcatccagggttcggggaaacgtttcatttcggagcgtgccatgcgttcactccatttttccgtttctgttttttgaggtgctgcgcaagccaggaaacaagcagttccacaggcgacaatcagtttcaataagtttttgttcatatcggtcgagttattattttccaatcaatacatattcttttcctgctttggtaggtaggtcatagaggtatgtctctgcaatttccactttgttcaagttggccttttcgttaatcaatggctccggaatggtggggactgcataaagagggttcggattttcacctttggcacgcttcaagccattcccggttaatgggttgagcgaacgtaaacgacaatttcctcccttatgagatttgacaaccagtcggctgactttcccgtttttccaactcaaatcaagttcgaaacctccacgggcaatgattcctttgatagaaccttctttccaaacggtaggcagtgcgggaagcaaatatataaaaccgtcgtagctttgcatcaacatctctgcaatgcctgcggcacaaccaaagtttccatcaatctgaaatggcggatgcgcatcgaacaggttagggtaggtgcctccttttttcttttcattgcgtacgagagtcagctggtcagttatcagcttgtaggcgtggtcgccatcaagcaggcgtgcccaaaggcaaactttccatcccatgctccacccggtcgacgggtcgccacgatgaatcagagaagtacgtgctgcatcaaatagttcaggagtacggtaaggggaaatctgattgctggggaagagtccgtacaaatgagaaatgtgacgatgcacgtccttcggatcatcccagtcgaacatccactcttgtaattgcccccaatgtcccacctgcatgggagccatttctttgagacgttgtgtcagatgagaggcaaacttctgatctgtatccagtatttgagaagcagatataattgctgtccaaagatcgaaaatcaattggttgtccatggtgcatccggcagctgtagtagctttcccgttacttcccgaatgtacattctccggtgaattactggggcagactaccagccagttgtgtacgggttctttcaccataatttcatcaaagaaacgtccggactctttcagtatcggatagacagaacgcaggaattccacatctccggtgtatagataacgctcccaaagatgtcggcaaagccatgcgccaccactgggccacatacccgaaggagctttgtcaactgctcctgtaatgcgccatatatccgtgttatgatgcaacacccatccgttggctccatacataatcttagccgtctctttacctgtgtcactcacttcttttatcagacggaataacggttcattcagttcacttagattcgttacttccgaaggccagtaattcatttccaaattgatgttacaagtatatttgctatcccaggaagggaataatttgtcattccaaattccttgtaaattggcgggttgtcctcccggttgggaagaacagatcaacaaataacgtccgaattgaaaataggtggcaactagatgtgtgtcattggtgtttttgaaattctccacacgcttatcggtggttacattcgcatattggtctcgtcccaaatcaagagaaacccgtgtcagatattgtcggtaaaaatcaacatgattcttcttcgattcaatgaacggatgaaccattgctttcgccaaataattctttgctcgctctgtctgattaccggtgatgtcttgatagttgttgaaattagttgcaatggatacatagataaccgcttcgtcggctttctcaacagaaagtattccatcggcacaagctattttcccacctttatttttagcagtcaatctgccttgaaattctacttttcctttcaatccttcatgcaaggaagagactcccgagagtgtcacacagtttccctcttcagaagcaatcataacatcctggtgaggagaagtgagttgtgcattgaaagtaatttgtccgggacgattggcggtcagtcgtaccattactacctgatcggtgaatgaggtgatcgtttcgcgttgatactgcactccgtctacttcataacgtacgattgcacgtgcggaatccagacttaattccctgtaataattggaataacgtgtatgaccgggaaaagcgattcgcaggtcaccaaaactttggtatggcattcctgaattagtctttgccatcaccttctctgtggccagtgtctgtgcttcaagatattttccggcaaagaccagctcacgcactttcggaatatattccagtgcatccggattggcgttattattgggacgtcccgcccaaatgctttcttcgtttagttgtatttgttctgtgcctggtgttccatataccatggcccccaaacgaccattcccaaggggtaatgcctcggtccatacctgtgcgggacagtcgtaccatagcttgtattcgggtacagaagacttctgttcctgcgcctgaatacaaccaacagacatcgtgacgaacagatatccgattaatttctttttattcatttccttccaattgcttttatacttttataaaaggacgattgaaagggatttttgtacccactatgcaggcagtaagaaagggagaagaataaaaataagttagcaaacttaaatgcagttataaagccattaaaatagatgaatttcgacaaacaaacagatatactgattgttgtcacattgaatcattcgtttttttattcacctaaaaaatacagattatggcaaagaattctcccgatgaaggaaaaaacatcaaaatggtagaaaagcaggcggttgaagcctctatgattaacctcaaagagtaccgggcaaaaaggcaattcggtaaaacaccggaaccgatggcggatacggtggaaactcccaatcgaatgcctgtttttgttgttcagaagcatgatgccagtcattttcatttcgattttcgtttggaagtggatggagtattaaaaagttgggtggtgcctaaaggaccttccatgaatccaaaagataagaggttggccatagaagtagaagaccaccccttgagttatgcgcactttgaaggagttataccggaaggtaactatggagcaggtacggtggaaatatgggatagtggaacctatgcttacgttggtaataatcataacatttccgctgccattaaaaatgggatacttgaattcaagttacacgggcataaactcaaagggctatttgtccttatacataccaatatggatgatcaggataaagactggctgttgataaagaaagatgatgtatttgcggccactcacgtttacgatgcaaagattattccgtcttatgatgaggtattcctgtaaactatgatctgatagtacttatcagaagtctattattttcaaattatatacgcggctttataattctacttatttcattattctaatgattaagtggaactatatgctcgtgtggttgtattgttttgtggtaaaatattttacaattactatgttttaccaaataaaatgatgattttagaatctatcccttgatatttcggtaacaaacgatattgttaccacttttgatagaaaacacccattgtttttgttagaatccacctcatatgtggacgttgaaaactttatacttgtgccggatttagacacgttaaaagatcatcaaacgtgttttgctgaaaatgtaagtattaatcaaatcctatataagtatgaatgattgttacctgagtttattattaaactttcgcgctttactttctatagatagtggagtcaatttagtaaacagtaaacaagctattggcgtaattctggaaaacttctgttattgccttatacaaagggctttgggagaattacccattttttaggtaatgacttggcaacagtgctatatactgcgttctgccttgatttgctattcaagcaactcgttggatacaaatgtacgaaagatattggaacaataatacaaaaaagagaaaaagctagtacccttttgtgagtaccagcctttttctttaaatattttaaatattatctaagttccaaatttctttagctgcttgaacaattttattaaatcgtttttctatgcttgttttgtcccaaacaggattatccttgtccgctacaaattcaatgacttctttctgctggttcaataaattgtctttaccataaacttgtaatttctgtgggaaagaacggtttcctaatgagctattttgacttcctgccatcaacattaaattacctacacaatttaaccattccccggaaacaataccctcacttggattttcattgtcttcatagacaccatagccattttctaagggattaggctgtgtctgtggcgcaatatgttctatgctttcgttagatatgacatctccaaaagatattttgggagtgggataattgttattacataaatactgttcatatctccacaataagtaattatctacgcgatttccataaaaccaaccgctttttaaatgattgtacatttctgtatcactccaatatccccaccaccagtcatttttaagtttccatataatattatcaatcattttattaaaacttgaattgtcgcttgcgctcggcaacacgttttgcaagcgacttgttatatcagctcgtccgcctcttattaatgacctaaatgtaagattttccattagcctgataaggcgcatgaaaacatcatcatctacatccgacaattttgctttgatgagtattggataagcatatgccatattgtttaagttcttcaaattcgctgtgtaaaaagaattgtcttgctctatttgtcgaataaggcaaaatgctttggataatccattaacaaaatatttgattttttgaacctgtttctcttgtgaaactgcttttatccatgcttttacctcacgaataacattttcgctataataaccttttgtacctacagctctccaataatagttcagaacattatcttcttccaccgtaacaagaactatgttatgatagatttcctcaaaagccttttctacatagactatatcatcttcattattttgtgattgataaatctgtaacatgaaatatgctttgagtacctctaaattagttaacctttttcctcggtcattttgataagcaaatatctgtgcagcttgtaacttgtttttgacaatataggtcgtaattgacgcattttccaaagaataagcccatgaaagaagctgttctattgaggctttacttagtttttcctcaaaataagtcagagcattataaatcgacttttttgatttggaagtcaagtcctcttgagaaatattaatattgtggtctatgattgtatccgcaaagaaattattgtcataagctacggttataaatttttgccttgcatggcgtatatctttcaaataatagtcgtcaatgtcatccatccaatttttgatagtatcggcttctttcccgttcatccattctgtctctctatgtttcaatgtatttataaaagctctgaaaaagatgatgcaggtggtcaaacgttgttgtccgtcaattacataaagcgtatccccatcttgctcaaataagaaatgccccaagtaataatcacaaacttcacattcctccaaatcttctatgaactggataaattgtcttttctcccaagcataagccctttggtatgcagggatgacgaagcgaatgttacgccttccgaataaggctttaatggttgttgattccatataacaattttaaatgtttaatatttttatagctatttgagcgcaagcttctgcgtctgccagcgcatgatgatggttttctaaatcatacccgcaatattgcgctacagtttgtaattgatgattaggcagcttctctgccaaaacttttcttgaagccttacaagtacaataaaaacaataatttggataaggcatcttgtaggcttgaaagactgcctttaagcaactttcgtcaaaaggactgttatgtgccactaatggtaaaccctgtataagaggttctacctcagaccatacttcgggaaaatacaaagcttctttcgtgtcatctgctgtcagcccatgtacttgtgtattccaatatgaataaaaatcaggtataggatgaataagcctataaaacttatccacaacttgattgttccttacaattacaactcctacactacaaacacttgaacggtgttggtttgctgtttcaaaatcaatagccgcaaaattcttcatcgcttttttatgtatagagtcaggcagtcagtggcaaattttctcaatccaatatttaaccctctctgccacatcatctgcttgaacagatggaatttcctccagtattacatatccatcttcttgctgtattttatcttcacaccccatcctttttaatgtattgcgcaatttttctgtatcgcattgtcggttggcaaattgcacaagcacctttccgcttttctctttctctataatgtccatataaggaataccttcctcttcattatcatattcgcaagcaagcatatcccaataccaaatgaatgttttccaatggtcataagttccaactttttctttccattccgcagtacgatgatgtcgggttaataaatcctttaattgttctatgcaatcaatgatatattgctgcaactcttgattacgattaaaggactctgcaaaatcatcttcggggatgctgaaataaggttcaggtaaatattgccaccatagtcccttactacgtcttccacctttttcccatttaatgggtttggagaaatcagcatctcccaaataagttgcttggatgtaataatgcccttcataaaatcctaaatcaatagtccccggatttccgttgttgcttgtaatacgcaaactattgctttgatttagcaaatcttcaactatccaattctctgcttcccattttttgatggctttttcccataatgcacgattaggcatatcagacgattccacagattgggtatctgcattttttgattgaatagattgattgtcatctttggttgtctgcgcaaaaggattttgggacaatacatttaaatcaacaacaagatgttgcttgttatctatttgtttgacattcccctctttggcgtttcgataagcttctgaaaaattgagtaatgttgtttgtttatgttctgaatcgaatttaaaatcagcaccatataggtcttttctaaaggcttcaaccacgcaaaacagattttccaataatggctcaggggtattgcttttacctcctccgttgatttctttggattcttccgaacaagtgtattcaatgattttctttacagcggtactgacggatgctatgtaacagggggaacaatgcatcgctacataagaagtttgaaattccaactgcattttctcctcatctgaaagacttccatcttttataacatcataaagcgtttgtagatactcctgataaatccgcagtttttcctcaaagacttttgaagctctttctcgttcaacatcattgtcactttgtcctcgaagtaaaatcatagtgataattgcggttatgattacaccgagaacggcagcaaacatttcataccatagttctttctgtgtaaacaagcgcaaataaatagcaaaaaaacaagccaatataatcagaacggctgttatgcctacaattctgttttgtgttagtttcatattactcatgtgtataaagataatagaaaacctgccttgaatggtggcgttcgattcctttcaaagcaggtatatctataataataggtgattatcgcttattccaacttctaccttcattagacgaataatatagccctttgctggttgttgctaaaaggtagcgtccatcagtactcagttgttgaaaagttccagcagaagaacctgtataacgagagttccaacttctaccttcgtttgtagaataataaattccttttgaagtacaagctaagagttcacttccaaactgaaacaaatcatagaaaattccagcagaagaacttgtgtaacgagaattccaactccgtccatcattagtagaatactcgattgtgtttttctgagtgttaatgcgaagcatttcacgtccataattaattaactgtgccatactatttcccaatgtctaccaatacccagaaaagacttttataaaaccacgaagcgtgggtactgtatatccacgtctctgtgataaggtggtaggaaaaccttggaaaaagaaatgggaataacagccccacgcatatacgtggagaccattacgacctctcttgtttcctgtgaatctaagtttcctgcgcttttatcacacaagtagaagacataacgcctcgatattttcaatatgtaatggaaagagttgcctcaatccaatacaaaagtatgaaaaatccgtgatataccattctactatcacggattctttttgatttacagtttcatactcctattctgtcttggtttcggtattccgatagcttctctaaactcattcattttctttctgaaccagttcacgtgtgaaaccccgtctatcttgaaatcgaatctaccgttttcgtcctgtctgatggaacagacggagtgtcgggtatcaaaacttcggttaaattcggaagaatagagttcgccttttatcccgacttccttgaactcgcacagtcttctgattattccgtcattgaatcccaatcggtcacgcaggaagtttattataggcatcagcttctccacatacgggaaatagcgtctgacaaaatccgtaaactccgacagcttgcggtgctgttgctcgtaagcgtttcttatctcctgtatctgttcggcttgttgccgttcccgttgtcgggcttcgtcttcaagttcaaggatgcggtcttgcaagtcctcgttcctgcgttccaacgatttcattcttccacttccgaaaagagaacccacactgcatgcaagggcggttgccgtatcggtggctgcgcttttgagcttgtcggtgcggatttccgcttttacctgtttcagttcctcctgtgcctcggctttcttctcctgtaacagtctggtttcggtttcaagggtttcatttttctttttcaagtcccgataatactgcatggtggtagtgtgccgtgcttccgagccccgtaccccacgttgcaatccgtatttcgtcatcacccttgcgtaattgtcgtggtaggcaatcagggtctgacggttgaacaggtcatcggcacacaaacggacggaatttgttttcttgcggtacttgcgcttaccgtccgtctgttctttcttggctttgcgcctttcacccgtcacgataggaacaacggctgcgtggatgtgcggagtcttctcgtccatgtgcagatgggcggcaaccacattgtctttgccgaatgtggcttgcagccattggatgctgtcgttgcaccattcgtcgagctttcctttttcctgtatgttcatcatgtcctcgtgcgtacccgacaagaccacccgaacgacacggacttggtcgtgtgtaattttccgtctgatgcctgctgtgttcagcctgtgggcaatcgcttcatccctgccgtgaacgccatcggggtattcgacaagcaccctgttcaggtgtgtccttgccgggtctgcgtttttaggtattatctttctctctatatggtcggactgcgtggtgtccgatgtaccctttgctttctttatgtccaatgaaaaatatcccatattattcctgtttttgcggttatcattatgtttcttctttctgcctgtggcatcggctcacagggtttattatgcaaatgaaccattgctgcactcggcataatccaaacgagtttggcttctgctctcgtttgcacagggtttccaaagggatttccctttggctcgatagggtgtttttagcgttacggagtaatgcgtgaagaaaacgccctattgagctatggtatttctgtctaaatacctttgggaaagcgaacgtgcatattacagttgaaattcccctttctttttcggtggctgcatcatccgccttgcggattggacttgcttcttctcctttatcggctctgccgattgggacaagggcttaccgcacaggtagtcgttcaagtccttatactcacgatagtacattgacttgtcaagcagccgttccccaaacttctctttcagcttcttgcaagtgttccgtcctgccgtgtcgttgtcaaggaaacagccgacttgggtgtaggtctccaatatgctttccgcttttgcaagattggaaacggagttcaatatgatatagtcctgtgtgtccaatcgcgggtgttgcggattgttttctactcggatggtaaggaatgaaaggtaatccatgaacccctcgaacaggtaacacatacatcgttgtccgccctgctgtcggatatgggtgatgtctttcggggcgacacatcccttgaagtatctgttgcgcacttcatatcctcctgccatgttcggaaagccgatggcaaaatagggtttgtcggcattcataaaccgaagctccctgcattcccttttggcaagtccgatgtttattcccctttcttgcagataggctataagagcaggagaggacaactcaccaacccttaatccctgataaggctgattgtcggaatgctgtctgccaaaagagaacgatgcagggcggatgtatgctgtccgctcctctatgcgtttcagcagataggctacatcttccgaatggtagagttccgctgccaatgaaataatattaccgcctttgccgatgccgaagtcgtaccatttttcaagctcggtgtttaccttgaacgatgcgtccgtttcttcccgtagcggtgatttataccacaggttcctgccttgttgctttacaggcatatagcccagactttgcagatagtctgccagtttgatttgttttacatcttggattgtcatattacatacggttttgaagttgatgaaaatttgttgatttgatgaactgttgatgtaatatgtttatatacagacctgtaagctttcaacatcttctcaacaaaccgctcgccaaaagagaaatccacaaacgggtgtcggtggtctctcaacttctcttttggcttgttgagattttgttgagaatgtatatcgtttattgtcattgtatttatacacatattcaacaattcaacagaaaaatgatagtattacagggattcgagttgctcccttgtgacggtgtagaagcgtcccaccctctttatcggctcatagtgacaacttctgttgtaattgccctgataggtggtgtaggtaagcccgtttggtgcaggtgttagtttccagcactcctgcaccaccttacgcacttggtgcttttccgcctttacctgcgagtgcaccagcagtacgacaaggtcgttaaggcagaatgaaacgctatccacatccattgcaaccataatgtcaagcagcagttccgacatctctatctccagccgattgcggttgctacggataatcttctgcaaggcttctgtatgcagcaatgtggggttgaaccacatccggctttccttttcggtggacagttttctgtgttgcaggaaatggagaaaggcgggtatctccgctttcagcttttgcaggaagtcggtatcatcggacagcaagcggtctatcttgcgtacccaatagcgtgtttcccctgcgtctatgattacgggcagatgctcgttgttggagcacagcacgaatttggcgaagaacgcaatctcgtcacggtctttgcctttggcttctaccttgtaggaaagtgtggtgctgaggttcttcaaccgttcgctgtcctccctgcggttgagcaacacctcatccaccacgatgagcagtttgccagcccaatcggaattgaaccggcttcggaagtcctcgttggtgttaaaagttacattgttctgaaagaggagtttcagaaagttcaggaatgtgcttttgcctgtgttgcgttcttccgataccaacagcaggataggcaacttctgaatcggttgcaggtagagcagttgcagatagtccatccccaactcgtattgttccccgaagatgtgccgtaccaaagattggatatgcgataaatcgccctcctgcggtcggtggtctatcggttcgtaaaggttaaggaacttaccgaccacggaacggtagccgatgtgttcgggtacggtgcagaagccgtcatacttgggaacgctgccgatgtaatccttgccgtaatcctgtcgcagggtctcgttgttccatgcgatgcgtttcttcacataccctccgttcagtctcggttgctccacaatcttgtagagcgttgtcccgacacggataaattcttcctttgccatgccgccatccgatggcggtctgtggctgtcctgttgttcgatagctgacataatcaaatggttttaagtttgaaaattaccagctacaaaaatataatcaattatcggataggttgttatgcaaaacacggcagaatggtgacaaatagcccccgaaacaaaaactttcaatggtttggggcaggaaacgggttgtgcaaacggaaaaactcccgaaaagcaaatgtcggattacgcttttcgggagaaaaaatcagagcgtctgtcgttctgtcgtactgacttaatgaattactgacttaccgagtgaataatgtcaggcattcagctacgagaagtattcggatttggatataccgttggtattcagcgagaagaagatgcttgttttctcttttcgcaggtacagtctttcaagaacggcattgcgtacccgttccgctccgaatgtgccgatatggaaagcgagggtaactatcgcttcaaggttgtaaacctccatactgcaattatcggatacccgtatgcttcgccttatcccgtattcccttaaaactccgctcttgcaaagagccttcagccctgcacggaatgtcggggcggttactccgaacaggtcgcaaagttcccattcgctcatggcggttgcgctaatgtcggtcggcaaggtgatgttgccgttgccgtccgttgtgatgatgcttcgtttcctggctatgcttggttatggggttacacttccgaacgatgcgttcagcttgttgccgaacgtcgtcaggtcattgtcaagtttctgtgtggttatcttcgcatagatttgagtcgtgacaatgttcgtgtgtcccagaacacggctcacgctttcaatgggcatccccttgctaagagccagtgttccaaacgtatgacgtgcgcaatggtaggagatttgcttctctataccgcattccgccattacctttttcagttgtttgcacatcgtccaatagttgattttcccgaaaaccagcttgtcttccgacagatacttgtaccgttcgattatctgcaagggaatatccagcaacttcacttggaacgggacatttgtcttgtgccgtttcgacaatatccatttctcaccgttcacctccactatttcatccgttgagagttctttcatatccacgaaagacaaggcggtgaagcaggcgaaaatgaacaggtctcgcaccaatgcgagggtggggttgtcaaactcgtgcgccatgattcttttgatttcgtcctctgtcagatactcccgttccttaacattcgggctgatatggaactgcgcaaacggatttctcggtatcagtccgttatagtgcgcacgcatgaccacgcctttcagccacatgcagttcagccagatggtggcgtttttcagtccccgttcagccgtaagataagccgcaaactccttgatgaagtcgggtgtaagttccagcatggacatatccgtccgtctgtagaatgacttgataaaggctgcgacatagttccttgcccttaccatgaccttgtatgtgccgatgctgcgatctttgccgacacgtttcaggaagttggcgcaatccttgtcaaaagcctttatcagtgtctcatactcgcttcctaccccttggtaggcattgcgcaccatttcagccgttacgtatgcctctcggtcggatatgcgctgatagtgcttgatgatttgcgccttgatgttgtccaatgccagattgatgttccgtgcttcggcactcttgcctttggctcggttgcctttcgcatcccaaagggttttcgggatggtctgcttgcaactgaactgcgccacagtaccgttgattgtcactcgtcccatgatggggacaataccgtctttctccttgctgccgttcacgtagaacagcactttgaatgtacttcttgccatactcgttttttgtttgcaaagttaaatatcaacgagttagaccttgatacgcaaatcggtgacaaacggtgcaatagcatctcccatatgttaaatcttactctttcacgggtaatgatttgcaaaccattcttcttcttaaatccgcttttctttgcgttttccgatttttcggcttgtcatcatttgacaccgtaacaactctgatattaagtcgtttagcgtcatttctcccgtttttcgaggttattccagagattttacgtaattttgcctgatttgtcattgcttggttatgcagttcctgtagagagtttcggcattgggctatttattgttttgtttgcgtatcttgcggtagagtataatgttcagttgttgtcacatgaaaaacttaagatagctatgaacatgctccatactacgcataccccgttgatactattacgaaatcaattggaagaacttaaaaccggtaatcttcccgaatcgctttcccaacaggtagaagaggcattggggtataccgaatgcatcatatattgcaatcagaatattgtaacccttaataaggtaaacaaaaaaatacttcctaagacatcaacagtaaatttggaactctcttcttatattacttctattgttaatcaatgtcgtccctatgctgattcgcgccgtatacaactgactgtcagcgaatgttcggattgcgtcagttgcaggatcaatgagaacataatgacggcagcgcttcaacatcttataagcaaactaattttggcttccgatttaggctgttgcatatcaatcaatataacacatacaatagattcctggcagttgcagattactaattgtgagatagcagacaaaagagtagggaaaatgtttccttttattccggtcatatttcccatatatgggtatagtgatttgtggactgtaagaaaaatcattcgcctgcatggtggaaaaataaacggatatagacatggcaaatcatttgctttccaaattgtcattccaacagattgtcattgccggaatcaggaatgttcggctatcaaacattcttcaacaaacacgaagaaaaaaactaaagaatcttcagaaagtgataaagatgataccccgaatactaaaacaaaagatacatcccatatcttattggtaatggcggacggggcattcaggaattatttaaaaaaagccttatcgcggtattttcagatttcagctttggaggatcctgatttgctgaaggatacagtagtccgccaaaatcctgatgctataattattgacgataatgtaaacggaacaaatggagatacacttagtttccggatcaaaacagataaaatgatagggtatataccggttgttcttttgataagggcctttgataacgaaagttatttgtctcatttaggaagtggggcggatcgtctggaattacgaacagaaagcatttgcaggctaagggcaaacatacgtatgcttgtagaaaaccgcatggtcttgcgtgaacgggtcaaattgtttttgtcggatgctgttttcccaatggtacccaccaaagaagaaatggaaacagaaaatacggatcagatatttatggataaagtcaataaaatcctggaaacgaacctttctactgataaatatacaatagataaattaagcatcgatataggaatgagccgtactgctttttatagcaggatacgagagataaccgggaatcctccggaaaattatatctattcgttcaaaatgggcagggcacttaaactgctggcctcccaacagtacactgtttcggaaattgcaggaatgctgggatattgtgatgctaaatattttggaaagaagttcaaagacttttatcatgtatgtcctacggattacattaaaagtattatagggtaaaagaatgtatagtacatattttcagtttaaatgatataaactaaaatatgtactatattcattgtaaatattagatagagaagaacatatagctctgttaatttctaatacaattgtgtgcgattaagtaaactttacccatacctatgggcaatccttcaaagtggtgacatgttcttttaaacgagaaaaaaatgaaaatcctatttcttatgcaaaacttgcgatatgatttctttttgtatattctcatcaatgatttccatttttattttgttcaggaattccatttctcctttcttgtatttttgattgatgataagggcagctagtatcagtacatgtttgtaataccgttctataaaatatttattatcgcagacatgtatttggcgaaatagactatctgtgactttcttccaaaatacctctcgttctatttcatcattgaaagcttcagaagcactaataagcagtagttggcagcagaatatgaaacattctgattgtagcttatcataaagatcattctctggcgtcgcattccatccctcatacacaatatggcataatttcgattccttttctaatagtaacttgccggaatctcccatatgcgttattgcattgatcattgtattgagattagcaatactgttagaatccaatgttggataccatttatatgtattattctttatattattaatgatagtctttatagccgattctaacttagatacattgggctcttcatcattgaggagtatatctatcacaagtatcaagtagtcaaagtctcccgtatctatatccaaataggctgcattatacttattaataatataatcctttatcaatttagtcaacttattatatgcttcagaatgtacatctttcctgccatctctttgtttcagtgttgctgcccatctggttagttcctgctttgtgaaacatattcgtaatttttcaaatatcacttttacatgaacttttaaatgagtcttccaattattgtatttgagttcaccttgtctttgaatttgaagaaagctcttataataatcattgtcttcattcagtgtataagaatggaggtttacagatacttgttgactccattcgaaccaatattctcttatcaaggcagccattgttttaggatattcgaaatggtatttttcaagattatggagtattgcaagaaaatgttgctctgctttaagttccagaataagtgccgattgcagaaataaatgttttaagttttgtagtagagtgagccattgcaaataattgccttctcgtagtaacctgttagaaagtatataatattcaccaggtaaaaatatatagcaggagtgacaatgataaatttgtgaaacatcgttttgcaattcttcgtcactttttcctaataatagataattgaacgtttcttctttaccatgagcacaagaatgggaacgtttgagtacatcgtcaggatcgagtgtcatgttattgtaaagtgcatctgctattgattttgcttgcaactcttctttattatatgtatgtggggcttccttccattttatgacattacataattcatggaagtttctattcggaatttcaatatccagattcataatgtctttattttgctaattgagatttcagtgagttcaaaactctggtcaaatgagtaatatgttttaatagctttccttccgggcttgcattgagcttaactttgcgttggatatagccgtcaagtgactccgagttttctgtgtcattccaccatctttcgaagttcttacgcatatattctaaactaccttgtggtatcttgcaaatagaagatgctctgttgccaaactcatttaatgaagaaccaataagccagccacaatcatcaatgataataaaacgatcgtgaatagacagatttttggtaagcgaacgacattctgctacctctcttcctacttttctgttgtagtagttgatgcaatcgttcaattttaatagatagtcttcggaatctggtgcgcttatattacctaactgtttctcactgttgataattctcactttaacatcaagtttttccataaagaatatgtacttttcgaaatcttctttcttgaaataaggatcacaaatgagacattcgttttctgcagagttgagtagttgcatgacatattctcttgccttttctttgttttctttattctgattagtatctgcactaaaaaatacaaactccatgtgtttttcattcaattcagctaaacaacgcgactcatcatcagcaaggttatcctttaattttttatttgatttccttcttttcttaccattcaaggcaatttttgttacagttacagttcttttgctgccatctgattcacttttctccaattcaatttctttagatgaaaaagtttcataactgaattcttttcctaaaaaaaagacacgtttattcatccaaattagctcaccatcgttattgaatatctttatgccaacttgcagtgagaagaatggtagcggaataaatatattcgctgatctgcaatcaataactgtatccgtttcagttataatgttactttcattatcatactgcgttattctcacttttaaagaatctacatatggcttcctgaatttcatttgcatatgaagtccatttggtttttcggatacccgaaagtcaatattccgaaatatctcattattatgtaggatatatacattaccgatatggctggtatattccataatgtcatatcctaaatgtttctttgtgagatatgagagttttgggagcaaacctttcaattgaagaagttccttcagcatttgagaattaggatcaaagaaacctttcagtctgaaagaacatttgcgtttaggtaatatatctggtaaagtaatcaattcttttttttccaattctagaaatagctttcctaggggattaccagaggggtattgcataaaagaatcattcaaaaaataaagaggcattccatatatagtaatttcatccataggagcttgaggtagaatgtcggtatcaatatcctctattagtagtccggtacggaatggagcatcgtctctaccacgatcgagaaaacattttcttgacattgatggattgtaatcctgcatatcatccaaaatattctcaataacagtaagtatattataatacttattctgttttatgtctttaaggtataatatggttcgtcgtatcatattgatagaagtgagtgtatactttcataatcgtctgttttacagtaattttcatacaatcttccattttttgaattactacatgggcaagtctctggattctatctcttctattatttgcgtaactttgttgataatccaattggcgacctcaccagtttgcatgggtaagtaactactagtggagtgccaatctttacaaggaagccattcagaaccataaggccaccattcattgtttgctgaatccggtccggaaaaacatgatagttgaacacgaggtaaagttcgatcttcgccagcagatttataagattttgagacaccaatataaagattcttccaatccgaatctcttccattatctctcgttacagttatataatgagaccaattttgttttttgaataatatagccggaccttcattcccttttttgacttcaaaaaacaggcccatttgggatgcgaattcacctaatggtttaaatacgaattcattccttaatctattgctaatttcagctctgttatccatcaaggccacaacagcctctatattattgatggctaaatctactattttatcactactatctttattcatatcttgtccggttatttgtttaataagtgttatgtactgggaaatagtctctcttgccaacggtttgtcgtatgccaacataacacactgcgacaaccaatagagaatatgctcatcgtatgagatacaatgatagtcaatctcttcgtctcccaatgaatctttgcttgcctcatgaccatcaagtgtaagataaatcagtttgaacccttttggaaagtgttgctttccatagttgttgtatcgcagtaactgatggtgttgatcaatagcatatatcttattctcaatgattactgcatgttctccatcctctaagattatatcaatgcgcccaccagtggactctgttcgctcaccaatgtatcgttcgactatattggttttacagttggaaatataatctttgtttaagccaatagctgcaaggaattctttaagtagagcatctttcagtccatgacttccgtttggatttaacaactctgcaagaaatgcggaatgtaatcttatctcatcagaccatagtccaagcatgttgaaaacattgaagtaatctccgtttcgttgcttctgcttcatccgttcttgctcaacaagacataccttgtctatttcgattaaaaattcattcaattccatactttagacattttgttgcacacaaaaataataaaaaacgatccattttatatgggcctataaaagaatcacctatttttctcctccttcatcatcttcctccacctctgaaatgccctcatcaaactttcttcttccactaaccctaccatattataatgttcgacaaaagtttccattgattttttgaacatgatgccgtggcagtatttattttccagtagaaattcataaagttcggccctcatttctacttccattgctttttcaatgataagtgcactgttatgacctatataattatatacatttggatttttgccgtttctgggatgggggagggtgaaggtaatatttccggtttcgtgccatgaggcgttgggagggtggggaatggatagctggtggagaaagtggtagatgggctgggtgtcgagaagatggatcgcggaaagtgaggaagaagagcggtctggaggtacgtcgaggtgatttttgtagcgcatgtacatgtaagccgctagatagggcttgatctgaaaagtaactgtaaccattgtttttagatttgatttgtaaaatatttatcagtggagtaccgtgtttgatattggtatccgttttctcttgttggaaattttacttaaaaagaaaggccgggaggacgcttttgtaatgctttgcttttcagatagttacataagtgggttttggttttaaaccaacgggtcgttcctttaaaaggaacgacccgttgcacaccgagaaacacctcgttggttttaatgcaacgaggtgctccttaaaatcaagagataaagctagaataaatctctcgaaattttgaaatcatgaaataacttgtttgtttttgatgtaaataaatagtactattgtatatttacttgtttttatctatataaagaaatatacagagtgtcatatatgaagaaattttagatgaagtctatttaacatagtttaaatgagcctcttttatatttctgattttattttatgtttgagggagatttaaaatataattataatgtaactgaaaagtagaataggaaggaaatccaagtaaaatggctaatagtagctccttaaaacgaaaaagcactaagttctatcagaacttagtgctttttcatattctattcttattaaaataaatatatagttcttaaaatacaaattatatctctttttcggattgtatttattaacagttccggtttggtattatataatggaacaaaagtatatattctttttgcaaaaaacaacgaaaagacatattttttttatggaatagtcatctaaattgatagaaaaagtaaaatcaagcaacatttctttccagaattacatatttgatgtaaaaacactacaaaaacaatggattataattaagttctgatagaacttatctaagtgtaaaaagtgagtttaaatgttttagggctatttaataatttaaaaagagatttatgaagaaaaaattagcgctgctatttggatacctttttataggtatcgggctgataacagctcaaacgcagaaagtcacggggacagttatttccgatgatgacaaacaacctgttgtaggggcttcaattgttgtaaaaggcactaacttaggtacaataacagacatagacgggcatttcactttattgaatgtgccaaattcagcaaaaatattgcaaatctcttatatcggtatgaaaacggagtcggtttctgttcagccgactgttagagttatcttaaagtctgatacacaactgatggatgaagttgttgtggtaggttacggatcagcaaagaaactagggtcagtagtcggttcggtaacaacggtaaataatagcaagatagccaatagaccggttgctaatgccggagatgcattacaaggacaagttgccggtttacaagtatttactcccagtggagaaccaagtggaagtgttgtaatgcgattgcgtggagtcagctcgatcaattcaaatacagaacctctctttattctcgacggttcacctatatcatccggagcatttacagcattaaatccgaacgacatcgaaagcatgaccgtattgaaagatgcttcctcaacagctatatatggttctcgtgctgctaacggggtagtaataatgactagcaagaaaggaaaaatgggacagaaagcccgtgttagtatcaatgcgcaatatggctggtcgagaatgactggggataacatagagatgatgaataccgaacaatggcttaacctgcaggaaatgctggatccgggaaaagcatacgatactacatttcaaaaacggaaaaagttctatatagataatggtatatctacagattgggcggatgtcttcttcggagatgcagctcctacacaacaatatgatgtaaatgtggtcggtggttccgaaggtatcaactattatatttcatttggacattatgatacagagggaattatggatgattcctcattgcgccgtgagactttgcgcagtaatgtggaagtaaaggtgaccgactggctgaaagccgggattaacgtgaacctttcctatcagaaatataacacgacaactttcggaacggaagctaatagcgtttataataaagcgtatgctgcccgtatttatcgtcctgaccaaacaataaacgagatattgacagacgaagaaggtaactttacaggatatggaaaacgattggactattttgacgatatgggatattataatccgtattacttggcagaacttcaaccgaatgaccggagtacggtacgtatcaatggcaataccttctttaatataaacccaataaaaggattgaatatacgtacctcgcaggcagtagatgcctttgattatcgtaactcccataaagcctatccggaaggcccctttgaaggggcaggggtggcgtccgagtctttcgaacgttattattcatttactttcaccaatacggcggaatataagttcagtctgtcagacaagcatctttttaccgtgttggccggtcaggagtccattatcacaaagaatgagaatttctcggcaacttctaaaaaaatggtagattcacgaatgatgctgatggcagctggagcagagtcagaagtgccgatacattcgatgtatgacaaggttttcaattcttatttcggcacaatcagttatagtttcgctgatcgctattatgtcgatttggcagcacggcgggacggttcttctctgtttgccaaaaacaaccagtgggcaaacttttattctttgggagccatgtgggatatgagaaaagagaatttcctgcagaacgtttcatggttgaacagtttacagttgaaagtgagctatggaacaactggtaattccggtatcagcgcctataatgcgttggcattggtcggctccggtttgctgtataacggacaaccgggtattgctccttctaccgtcggaaatgataacctgacatgggaaagcatgaaaacactgaatgtaggcatcagtacaagagtgtttgaccgcttttctgtagaactggaattttataaccgtcagacggacgatatgttgatgggttatccattgtcatacactaccggacatggtagtagtgtggaaaatgtagcaagtatgcgtaatcgtggtttcgatattactctgggagtggatattctgaaaacgagagatttctcatggagtgtctccgggaatctgaattataataagaatgagataactaaactgtttaacggattggatgaatataccttgcccgatactggtttaaaaatgaaggtcggcaaaccttggggagaatattactatgtaagatgggcaggagtcgatccgcgtgacggatataatatgtggtacgacaaaaatggaaatttgacgaagagttactccgaagaagatgcagtttttgtcggcaaacaacgctatgcgccatggtccggtggctttggtacccagttcggatggaaagggatttctgttagtgccgacttctcttttatgctaggccagtatatgttgaataatgagcgcttttttacagagaatcccacttttgcaggttcggacaatcaaactgtagaaatgcttaccatgtggcagaagccgggagatataaccagaattgccactcccgactccccgatgcagtttgatacgcatttactggaaaatgcttcatttatgcgtatgaaaaacctgactgtcgggtacacccttccggtcaaactgattcagaaaacaggagtaatcagtaacgccagaatctactttgtaggacgtaatttactcacagtgactaaatataaaggatatgacccggaagtagacagtaatatccaattgggtaactatcccaatacgaaacaatattctttcggagtcgaactaactttctaaaaacataaagaatggtgaatatgaagaaaatatctatgatagcattgactatactgacacttggggtgacttcttgtgatatggataaaatgccatacgatgctgttcctacagaagaagcgttaacgaccatagtcggttttgaagaagcacgtgccggtatctattccgtatatttaggactgacaggaggaagctatgtattagctccggaagttcaggcagatgcctttaatgcagtggcggatttctctaataaatatggtgagttgcaccgttggactttcgagagcaccaactctaccgtagaaacaatctggtcgaactactatgccgctatcggacgtgtcaacttctttattgacggggtaggtaagatcgatgagaatccggaaatcgaattgactgaaacccagagacaacagattaatgtgtatgagggggaagcgtattttacaagagcatactgctacttttatctagctactttattttgccgcgattacgatgtagctaccgcagcaagtactccgggactgccgcttcaggtaaaatatgagcctaaactttctgctacccaatatccgggacgatcttcattggaagatacttacaaacagatattggaggacctcgaagaagccgaagaacgtattgagactgcaaaaaatggcattgctgattatgacaggtatattaatggtgcatacgtgacagtcaacacggctcccaagaattgtgggaattatatcacggtagatgtagtgactgccttgaaagcacgtgttgccctgcaaatggacgactatgaaaatgcggccaaatatgcaggtgacctggttaattcgaatagatatccattatcgaacacagcaacagattttgaaagcgtatggaagaatgacaagggaacggaaaccatctggcagattgccatgactagtgccgacgatgctggtgtacctctggggactattttcattggttatccgactacaaagaaggattatattcctacacaaacactgattgacctatacaatgaaaaagatatccggctaaagacttatttcgggaaataccacttaaccgtatcgtcaggtaatgcggcggatatctatttctttaataaatatccgggcaatgaatattacaatgcattaggaagcgaaacacgctatttgaatcagccgaaaccattccgaattgctgaaatgtatctgattgccactgaagctaatgcaaagattggaacggcagctgctgtgaaaaagggtaatgacgctttgaatgcattaaaaaaagcgcgaatcgagggatggactgatgcaacctacgatcaggaagctttattaaatgaaatcatgaacgaacgggaacgggagcttgtaggtgagggataccggttgatggacttgaaacgttgggggaaaggtgtgaagcgtggaaaaccgcaaagcaaaggactggtgcttttcccgggacaagcaagtactgacggactggataaacctgtggatgaccagcggatgctttggcctattcctaaaacagaaatggatgccaaccctcaattggcaggtcagcagaatccgggatattaatcaatgaataacgtaaattatcaaacacttgagtaaaatgaactatctgaaaatatacaccctttttctatgtgccgttctgatcgccgcctgttcggacgatgaggaacagtttaattccggagcggctacggtaaacttgcaggaaactgtaatgacggtgaaagaatctgccggtttgtgtactgtgcctgttgttgtgacgggcgaacataccggaactatccgtgtgacgttcgaattaaaagatcataatgccaaagaggatgaaaactatattgtcacaaccaaaacgttacttattcctgccgggcaggaaacaatgaattttgagtttaagaccgttgatgacaagcttgttaatgacgaccgttcttttgatgttgaaattgctgatgtggaaggggcgtctattggtgagaacaagcgactgacagtgactatcaaagacaatgattcaagcttttatgaaacgctttcaggaacttggatatttaccggaacggcttctgccaccaatgtttccaatgtgccagtgggattctccgttagagtaaatacagcggaagaaggcacggaggcatacgaacactatctggtctgttcgaataagaatggatttgatccggataatgatattgaatgggaatttagttggcggttgcattatgaatatgattcggaggtgcagaaaacctacctgtccattgtgccgggtgaagatgtcgcttcttatggcccgtataccattcgtttcaggagactggctttggacggaagtacttctgacgtatatcgcggagaatatgatgctgaaactaaaactgtcactttcgagaatgccaatttgataggcgatatgtataaggacggcttgatacaaatacagaaattcaggctatttggctgtaagatggaacacatcagataaaacaagattattaacataacaaataaaaagaacttatgagagcattaattgtctgcattacgctgttgttcgcttttctaacttgtaccatggcacaaataccatcagtcaaggttgaaaatacgaaaggagcacaggtaaacacctcctccctgattaatcacaaaacacctatgattatttctttttgggcaacaacctgtaaaccatgtattcgtgaattggacgctataaatgaacaattgcccgattggttggaagaagccaatttccgtgtagtagctgtttcgacagatgacagccgttctactgctaaagcgcgtgcattggcagagggacatggatgggatgattttatcatgttgtacgataaaaatcaggaattcatgcgagctatgaatgtaagcctgactccacaggtatatgtagtggatgccgatgggaagattgtctattcacacaccgggtacgcgccgggaagtgagctggaactattgaaagcgataaaaaaactacagaaatagaaactgttattattcatagataaacgcaatgacatgactagaataagaattcaggtgttggctttagtagcgttagcgtctactctaacctatgcgcagcaagataacaaaaaaggttatctgacagggagctttgaaacgaatacgatttactacaaggatgatagtaagacaaaagcagaatctccggaagatcatttcggttcgaacaattatctgaaactggattactatcaaggtaagtttgccgtaggtgtacagttggaagcctatgaaccggtactggtgggatacccgacagaattggagaaagcaaaactaaccaactattacgtatcttgggccgacaaggatttttccgtaacagcgggtacattttatgagcagtttgggagtggactgctattccgtagttgggaggaccgtatgcttggtttgaataatgcggtgatgggagcacgttttacctacaattacaagaatattgtaaggttgaaggccatttggggaactccacgttttggaatggacttttccgacacacaagtacgtggcgtagatgtaagtttctccttatctgaaatgcttagttggcaaaatacgtccttgagtatcgaaggaggggcattgaaccggtatgagaaaatcaatatcgacctcgaagaagaagggggaaaaccttattcgaatggcttctcgggacgggtaaattttgaacgctccggatttacagcgaaaggtgaatatgtggacggtggcaataaatattataatttcatccatgatgataaactttatgcaaggaaacgtgccaatgcgcaattgctggagctgggatatagcggcaatgggttgggggtaaatctgaccgggcgccgtttggaatggatgaatagtgagattattgccggtaatggttcgacttcgaatctgttgaattatgtcccggctatgagtacgcaatatacctatatgttgaccaacttgcatcctcatactccacaaataggagatgtgacaaatgcagttagcggtgagatgggcggacaattggatgtcttttatcatttcaaaagaggaacggtcattggaggtaaacgcggtttgaaattacatgctaacttttctacctattatgctttagaaaaagaaggaacagcccagataggtaacttggcatttcgtgactttagtgttgatgtggaaaagcaatggacaaagtcattcaaaatgaacttgctttattctatgcaagaatatagcccttcgtacggagcgaataaaacgactaatctgtcgaatatttttgtagcagatttacaatataagttcacgccttctttttcaactcgcatggagttgcaatacctaactacaaaagaagatcagaaggactggatggcagctctgttggagataaattttgctccggcatggagcatttacggaagtgatatgtataatcacggcaaggataaaatccattattacaatgtgggagccagttatgccaagtcacgtacgcgtatagccttgagttatggtcgtaacaaggaagggtacgtctgctctggtggagtttgccggacgattcctaaatatacaggtgccaacctgactataactacttcattttgagttcatcgaaacatttattaattagaatatagaatatgagaaaatttacaatgttttttatgtcaagtctgatatgcttgtgcggatgttttacagcgtgcagcggtaattctgacgacaatggtgaagagccggataacggcgaagtgacaggacctattactttgactgtggataaagccaagattgaagccaatggaacagatatggcgacttttacggtgactgatgccaatggaaaagtactgacgacttccgaatatatgaagaatgtatattttgaagatgtaactaccggtgattatttggagagacggaccaatacgttctcggcagtagagaacgggacacataagtttaaggcatattacctggactgggagtcggatgaagtttccgtaaccgcacagaatcgtaagaattatgaacttttctatcgtaaagtaggtgtcttcaaaatgacgggaacttggtgtacctattgtccggccatgacttcggcattgaagaaagtggaagaactgatgccgggacgtatggtaaaaatggcttttcattcttccagcagttccgccactgacccgttccatttgtcacagacaagcacaatcatgggccgttttggagcgtccggttttcctacctgtatctatgatttgaaagtcatgtcgatagacaggaacgtgagtgctatcaaacagactttacaaagtcaaatccgacaatatccggcaacctgtggaattaaggtaaatacatcttataattcttctatgggtgagattacggtggatgccgcactgaagtcgagcttgggaggagaatatgaccttgtttatgtcttggtgactgatggcttaacagcatccggaggaaatgagacctcgtacgattatacagtaagagctatttccaacaattacctgtcgatgtcaaccgacggacggtttactgtgaaggcaaacgaggagcacactgccgcaactttcagcatttctaatgcaaagaacctgaatcctgccacatcgcgtgtagtggtttatgcattacgtaaagtggatgacgcatatatggtggataatataaccgaatgttctatcaatggtagcatagactatctctataatgattgaggcttatgaaaaaaatatactcgacaattctaccaattgtaatgatcctttgtttagcaatgctgtcatcctgttccggcaattcggacgaaacggagaatggggggacggatgacggcattttgcgtattacagctgataagacggctatacaggcagatggagtagaaaaagtgaccttcacggtcaaactgggtacaaaagatgtaagtgaagaaagcacaatgaacctgattttggtaaaggaatcgggagaggaaaacctggattatggtgttcgtgctttcagcacttcagtgccgggtacgtatgtctttaaagcccgctattatgaaggaaaagcaatggtcagtgaaaatgaagtgaccgttcaggttgctcccgtatcaggaggaaccagctattatcataaattactggggatgcagtttacttctgtcgggtgccaggcctgtccggcgcttagcactacattgaaagcaattcagactgaacaaccggggcgattggctatcgcttctttccacatggatttcggaggaatgacggatcccatgagtacagcagctaccaataattaccggactaatattctcggtaatttctcgggactgcctcgtttcttttacaatctgcgtaagggtactaaagaaatgatcagtatcaagagccagattgaagaagagcttcagaaagaattaagtaactatccggcttcttgtggggtagctgttgagtctgtgtataatgcttctgaccgtacagtgaagattactggcaaattaacttccaacgtaacaaacacttatcgttgtttgatttatctggtagaggatggaatcaaatactttcaaacgaatggcgcgaatgattatacgcataataatgtggtgcgcgcagtggtgtccacatcattgaacggcgaccgttttaatggggaagtaaatgcgggagtggaatctaccatgcaacgatcttatcagttggaaccgggatggaatgtggataatatgcgtgtgatagtgtcgatgctgacaactttggatggaggaaagacttatacgtgtaacaatgtaaatgagtgtaaacttggagaatcagcagattacttgtataacgaataaagaagagttatgtgtataaatgtctataaaataatattgctggtctgtatgtgctgtgtgggaatatgctggatttcttgttcaggcaattccgatgattcggagcagacggaagtgattttgagcgtcgataaaaatacgttgactgcggacggaaaggatattataacctttacggtaatgcatgcgggaatagatgtaactgctgatgcaatcatccgttccgtgatggacggacaaactttggatggaaataccttttctacttctaaagccggaacctacgcttttgaggcatcttatggcaactatgtatccaaattgataacagtagttgcaaaaagtacatcaggtacagtatccaattttgtgagacgcatctgcgcaatggagttcaccggaacatggtgcgccatgtgtccggcaggaatgacccgtctgaattatttgataagttcgagttacgagggaattgtttatctgatgtcatttcatgttgatgggacaagtgccgatccaatgacaattgaacagtcatcgattctttccagaaagtttgctatctccggttatccttcatgtgtggttgatatgcgtgggacaatggggctatctgaaaactatagtgtcatgcgggctatatttaatgagtctttggagaaataccctgctcattgcggagtagctatcagttctgtttataatgaggttgattccgaagctaaagttactgtgaaagtgacttcggagaaaacggctgattaccgcctggtattgtatgttgttgaaaatggattgaagtatcagcagaatgacggaggcaactatcgggactatacacataatcatgtagtccgcaaattactttctgcttctgtagaaggtgacaaactgggacaaattgcagaagataaggaagaagtaaaggagtatactgtggcattagacgatacatggaaagcagagaatctttctttttatgcattagtaatggatgaaaacggctatgtaaacaatttggctgtttgcgaagcaataaacggcaatgccgattatgaatatgtaaatgattaatcacatttatcacttagaattatgaagaagaaattaattagcttattatttttattagggctggtgttagttataagccctatggtgctatcgtgttcggataaggatgaacctgctgtggaacctgacgtgccggtgaccccggatgtaccacttcctcctgtaccaactccaatcagatgggtagaaaacgaagtggatggtggtgaacgtggggtaggcatcaaagtgactagcaaaactaccaacaactttgtgtttgaatgtaccccgggagataaggtgcaatcttatcgtttggatgtttatcctttatgtcgtatgtataactacttatttgaaagtggcggttcaggtgcaagtgaagaagaaatcgaagatttgattctgaaagctctctataattcggagggtgccggtgcttatactttcaacaggaaaacattaggagatagttacccgaatacagagtttgactggacaaattccaaatatgctcaatcggagattgtgccgggagcagaatatttgattataacggtagggtgtaatgatgaaggcggacaaaatccggctgatatgaaaatctgttatttgaaaactccttcaggagatgtagcaggccatcctcgtgttgaaattgatgttaaagcaagttatcaggcagctgccattcaatatgtccccaatgaggattgcaagtatttctatcagttctgtgcggattccgaacctatcgatgcgtttattgaagcttatggacagaatatgtatatcgactttatgagacactggacacagacatcagaagatgcacaggtacctgaagaagaattattatatatagttgattttggatataatgccgattcgaaaagaaaatttacggctactactatcggactggatgagaataagaataaaggagattatgtacggcaggatttccaattgaaagaaattcctgataatccggacgaggcggaatgtgacctgaagattgcaaaaacaggtgcttctattgttaacatggatgtaaaaatggagaaaacttgttatgccatgttttatcgtatattcagcgctgctgactgggcaccttatgaaaatgccgatgaagcaacaatgacggcacttgcacaagctttagatcaagaaggatgggggattaagaatataaatttcagtcaggaaggctcgtatgcaactacagattaccaacatgctcttgatcctaatacttcttatgttgttgcttatgtaggtcgtaatatgtatggacaattatcagaagtgaagacggaaactttttctaccaaagcacgagtaacggataatccgggagcatctaaagctacgatagatattgccatttccgatccgggacggacaagcctgaaattaacctatacttataatcaggaagcggcagtatattatcatcaatacattatgacgccggatttacttgaagaaggtaataaggctgaactgattaaatatctgatgtcagaaaattcaaatatatgggccgcaaataagaacggaggagtagaaagttttgcttggagcggtttggatcctggaacggaatatacattcgcttatatggcagaagactgggatggcgtattgacagatgtgaagattgtgaaagcaacaactgaagctattatagcaggtccgaatccaacgatgcaactgaatgcctacatgagtgatttgggcaactttacagttcagtattctattgtgaaggatgttgccaaactatattataccattatagaagataactattccgcaagtggtgactatacttatcaggaatgtatggatgtatggaaagagcgttgtctggattatggtttatcaggtgtcaattcaactactcaatcgtatgataagacaagtgaagccaaacgactggttgctttatgtgtgcctattggtgccgatgctgatggaaatgaagtaattggcgacctttatacagtattctatgataaagaaaaaggtattattactgatccttccgtattattccccgatgctccgaaattaaaaaaaggaataaagggaatagcgaagcctcaagtagtgaagaaagataaccgggttcctgcaaagctgattgttaatgaacaggtgaaagtgaatactccgggagtcatgagaagtgaaagtgttatttatcttgatttgaagaaattaggcaaacatcctcactccaaataaatatcggcaaaactaaatttaccgcacgatagtgtgtaaatctatcgtgcggtttttctctaatcattaaactttttatgggtatgagaagaaatcaatttttaggtggcataggaaaatgtatgtgtttcctggctgtatgtgttatgacattttcgtcatgctataatgacgatgatttgaagaattcgatttccggtttggaagatcgcatggataagttagaagcttctttgcaaagtgtacaaactgatatttccacattgaagacgctgactgatgctttatctcaaaataaatcaattgcttctgtgttggagaatgaagacggaagttatacaattaagttttcagataagacggaagtaactattcgtaatggtgaaaacggagaagatgctccgcaaataactgtgataaaaaacgaagaagatggcgtttattattggggaataaccagtacagacggcaagaagacattcctgaaagatggagaagggaatatgatgcccgtgacggctgctgctcctaaaattcgcattaatacgaatacaaaagagtgggagatttcgacagacggtggaaagacttgggaacctacgggtgtgtatgcatccggcgaagggacgggggatacctctcttttcagtggagtaagtcaggatgatgattatgcatatttcactctgaaagatggcacaatattaaagttgtcgaaatctaaggaattgaaatgtgaaatattatcgggaaaacaatattttgcaaacggtgaggagaaactgatttcggttgaaatgagtggtatttctaagtataccgtaacaaagcctgacggttggaaagcttcattgacaggaaagggattgactattattgctcctgttgcagagaatcagtatgcagaaacggggggcaaagtggcaataatggctgttgcgtctaatgggcaaagcataatctcggagattccggtgataataggtgaggctcctgttactatatctgttgaaggtcaaacgatttctactactttgacgaatggtgtagaaatgtattatttgggagtgctggaaattaatgaatatagtgcagaggccgtagctgaattagtgaacggatatgctgcccgtatgtacatgaagacagcagctcttgataaagttccattggcagaactgataggtaaggatcctgaagccggaaagacatatatgatttgggcagtacctccatctgaagctggtagtgaatatttgcctgatgacgtgattgccagcgtgattaagactgctgcaacagtagaactgaaggtttcggatataacgtttgaaggtgcaacggtttctgcaatcagaaagggttgtgacgtttattatacagggattatagataagccgaattattcacctgaaagagtgattgaagatctggcttatgggggaggaaccaaacaatattcggattataacgggccgttggaaggtaaggtgttagattttcttccaaaggtaatacctggaacaacgtatgtactttgggctattccttataaagaagaaaaagggtataaaacagaagaactggtagctgtggagattcctgtgcctgcgttgacgtatgacgggacagcgtcgataaatattaatagtgttgttactacggtttcaagtgtaagtgcgactattactcccggaactgactgttataagttctattattcttatatgaaagagcaaactctggcaaattatggtaccgacaaggaagttatttcttatcttattaaaaatggagattcttccaaagaggcagaaaactttgaaagagcctctttagaaccgggaacaaaaggcttttttattgcagtagcattaaatgagaaagggcaactcgggtcattagtcaaagtacaggctgattccaaagaaatatcttataattcatcaatttcggtagatgtgtcaatagaggcaggaactgtgtctacgactttaacgttgaccccgactggaaatccggaaaagttccgttatgttcacatgaaattgagtgatttcaaaagctatccgtattggggaaatgaagaaatggtaaaacaagcattaattatgaatgataatgttactgaaattgttgctgctgaactgaaaaatcatcaactggtgatcgaggacatagcatttaattcggaatatgtattgttcatgatagcagttgatactgatggtaacccttcttcaaccataacaaagaaggaatacaccagtgcgaagcctacttacgtgcgaaaagacagagacccggatttatggaatgccagtgtgccggaagtgacgattgacaagatagaaaaggataagttctataccgtttcttacactgtgaaacctaaggctgcctgcaaagtattttatgtatttgccggaccggcagattatctgactggtatgtatgatgaacaaatcaggtatgtaatgaaaaacggagtaaaacaaacaactacttattcaggaagtgtttatggaacattacctactaatatcaatgtaacctggatggacgaagaaggacgtttttatgaggtttctaaaaccgtagtagaagctccggcacaataatctttttaatttttctaatttaataataatgatagatgaaaaacttatttaatagcttttatagtatagtattgcttgccttgtgtctgattgctttcagtaattgttcggatagcgacgacgggggagatgtcggtgatactgataatggaatcactgcgattggtactgaaacggaaaagacggcttctatttatggagagactgttgaaatttcgtttacggcttctggaaaatggactccttctctacaatattctacaggagcagattgggctactataactaataccagtggtaattctgctgccggtaaagggggattaaaggtgaaaattaataaaaacgaatccggaaaagaacgaatattgactgtggttgtacaagtggaaggatataaagctcctgttacagtatgtactatcacacaaggaggaggatccggagcggcagtagacctagctcttaatgagtatatggataaatatttgaaggaacattatctctttaaagaagaatataatacattagatgtagattatgcatcggtttcttatgataattttctgtcaacttatcttttaccaatgaaaaccaataaagaggatggcggaacttatcgtgcattttcagtcaatgcaggcaagcgttatatctattcttatattatggaaacaggttccagtagaactcgtgcaaatactcgtgcaacaagtgttgtaggatcgggacttggaacgtttttctcttcttacatgccggataaaacaactattggattagccattggatatgtatatctagaatctcctgctcaaaaagccggattgagacggggggatgtaattgttgctgtaaatggtacgactttgaataagagtaattaccagcaatatatgagcactttgttttatgcaggtggaggtgaaacttttaagatcggctataggcgtaaaatctttgatgaaaaccggggcgactatgatttggtggatggaactactacattaaccactggtagttataataatagtcctatcttgaactcaatgtttatcaaagacaaaaaagagaataaattcaatatcggttatttagtttatctaggttttgatttgaattttgaggaagacttgaaatatgtaattcaacagttcaaggctgaaggcatcacagatttgattttggatttacgttttaacaatggaggttctgttgaattagctcgttatttagccgcttctatcgctggtacatcacatcgttcggatgtatttatgagaatgcaacgtaattccggtgcagatgaatatatccgttttggagatggtgatgatctaaatcttaaatctgtaagaatcatctgttcggaagaaacggcttccgctagtgaattgataattagcggattaagaggcatagattttcctgtgaaattatttggtagccgtacggaaggaaagaacgtaggaatggaagtgcaagaatataaatatggaaataaatattatgaatttgctccaattactttccgttctttcaatgcaaaagactggggagattatgctgacggtattgacccggatgtcatgttgaataatcaaaactcaagctatgaagatgatattgataatgtattcccttatgctttcggagattgggacaattttgattttaattatccattgtattgggcactatgcgatgttcaaggggtggatccgactacaggagaacctgttaaacgtagtggaagagcaggtttgacacgttcttcaaaagatgaaatcatcagagtaccatctgtacctttgaaacgccctgcgggaacttttggctcgctcatttacaacaagccggaagtagaaaacttatattagtaagactaaatctcttgtgaaataaattttctcttaagttaaaggggatgcttctcgataaggtgttagtgagagcatccccattttgctttaatactataaaatcacatgtaataattatgacatattatgggattctggaaaattgcattaataagtttattattaggaaacaattcggttttatcacagaataatcgattgttttatgactatgataataatggaaatcgaatttcacggacaaataatattgagagtaaagatcgtcaaataatgattactgcttctgttgatattccatatttggaatatgatgtagctgttgatgtaaataatcatactcttgatacacttttagcagtaggatctactccttatttttttgatatagcagcaaatggtgcttctatcttttcaattcctctctcattgcctgttggcaatggtggaataggacctaatttggaaattgtatacaatagttatagtggagatggagttttaggtacaggaataaatttgtcatgtttatcttcgataactcgtagtaatgaagagtctagatttaatgaattatattcttggaataaatattatttggatggtatacctctaatagcaaaatgggtggatggaaaaacagtctattataaagaaaataatgattattccttaataaccagagatgactataaacgttactttgtattgaccactcaagatggaatgaaatattattatggtgattacaaaggtaccagagcataccaattatctaatgctgaccagactactattatttcctggtatttagcttgtcaagaagatccttatggaaattatatattgtataattatcaacaagatattgaaaatgcagatatatggttgaagtcaattgaatatacattaaatgattcatgcaattacacacaaaccaatcgaattgatttcttatataatcgtgtgaaagatgttccaactggttttctgaatggtttcagggttaaacgtgataagatattgaaagaaatttttgtttttgcaggaagtgaacaggtacgtatctataaaatgaagtatatcaaagatgaaaaagatatatatccaaaacttaataacatacaagagtttggaaagaataatgtagcatataatcctattataataggctggggaaagcatcaaggtgagaaatgtttgcaaaaatatgcatttgaacatcgtccgacagatgtgatccaaggagactttaatggtgatggaatagaagattttctaacaatagataaacaatatataatgagacctccagaatatatggattctataaatattgtattagaggtccaaacaatagataaaaaaggaaatcgtgaaaaaatatggactacaaccatttatgaccaaaattattcttttactgttattcctggagattttaatggagatggtttattggatttagctatgttaactaaggatgatacgcatttcataattatgaaagcgtatctgaatgaggaaggtaaattaggttataaaacaacaacccgtttggggggagttgctagtcctgtattagttgggcattttgagggaaatagaaaagatcaactcctaatcggaaataaatgctactcttttgatgatgaattagtaaaatatacttccctagaaataaaagggactttgccaaacaatgggagttatgcagtcatagatgttgatggagataaatatgacgatatcattgtgtatgataaaaaaaagaaggagtttgtggcttatgctattaattcttatgggagtatctttgaattgacgcatttttcatttaatgaaggggaaattaatgatctcaaattcgggtacttcaataatgatcgatatgcagatatctttttttattgtaaatccggggaacaatacaaacaattgatatattattataatggaaaagaatttattaaaggagaaattacagaatcacatcctaatttatcttttttagttgcggattttaataatgatggtatatcggaattaatgtcctgttattatacaattgatcaagataaagaggctagagctacgattgttagttatcccggatgtcattttacgaataatatctatgatattgatgttacggatttatttctatctcctgatatttctcctggaacgacaagattagatgatgtgtattcgtataaaggaaaatcgtatgtttatcctataaaacatgatctttttgccggtgattttacaggggatggtagagctgatgtattagccatttctcaatccagagtaacagggccgggggtgattacacgttttcgtgacgtaaaatacagtttggtaacttttgatgaacaatgttcttctgatgtggtgattgatatcatagatggtaatgcgggtaggcgctctattgaatataatagtcatgtacaatcacgtgtgagtaagaatccgctaataaaaggattatatactcattggaataagcaatactcattaattcgaaatgtaaattatgtactaacatccgatttacataaagacattcatattggtaagaagtcatattcatatactactcctttttatagaaaggataaaggtaactttgttggatttgaaaaacaaataataacagattctcttttaaatactataacggttaacacttataatgtattaggatctccctgtgtattatatcttgccaaaagcgagtatcgtgttggacatgaaatcgtttcgtctactaactatggagctgaattacatgatttgtcagggagctattatttgagacatacatccgtttttgaaacagacttggataagcaatgtgaaaaagtggagcaatatacttatgatgaaatagataatatcataatctctgatgttagttatcaaggatttgctagggtaaataatatgccagaaaaaagaattttaaccaattatcaatatgtacgtccggataatctattatataaaaagaaaccttcaaaaattacaactgtctacacaagagatggagctaatagtatcactcaaacaaaaagatacgcttatactccacaaggaaaaatttctttagaatcatttaattcatattttaaaagatatcaatataatgtatgtggtcttttggttgcggagagtatagaagattctatcactaaaaaacaatttgtttatgaatatgatactaactttttacatcggagtaagactatatctccgacaggcttaatctcaactaatacagctgatgtctacggaaatactcttattaataccggaccgggaaatctgaaaacatattatacttatgatgatttattcagaccttataaaattaaggctcccgatggtactgtttcagtccggaaagcaataagaagaggacgtgataaacaaggattctatgttgcgaattatgttatattgaatggaaatacagaaaaaagtattatttttaataatgccatacactacgattgtctggggagagaaattcgaaaagaaaaagttctattaaatggaacacatgagcatattgatattttttataacgaaaaagggttatcagaaaagttgtattcatatagagggaaagttttagtaaattcgaaagaaatgtattatgataataagaatcgtattatacaagagaaaatatcatctccagttgatgtgggcaaaaatggaaaaactatagactatgtttattatgatccaaatgtcaggagagggaaaaaggtaaaagctgtaataactaatgcatctactactgactctattgttacaacaataatatataatcgtactgctttacctgtattaaaaattgaaaatagtgattcaatagtttaccaatatgatagtgctgataacttaattaaggtacgaacggtaagatatccgacagaggataaatatacagattatggattgagagtttctcatttcaataattctacaggtaaatcgacatatgaatataataatttcaatgaattagttaaagaagttgatggtcaaggaaataagattgaatatgcttatgataaagagggaagaataataacaaaaacgacagggaaaaatactgttcattatatttatgacgcacttactggttggctaaaaggaattgaatctttatcacataaactggaatatttatatgataatataggacgggttattgaagaaaagaaaacgacattagggataccgatggtcaagaaatatcagtatgacaactttggacgtttatcagtgtatacttctccgtctggtttcaagcaaaagaatgtatatgatgatagattttgtgaattggttgagattcgtgatataactacaggcgattcaaaaattctatggaaacgcgcgaaggtcgattctttgggatatatttcacaggttattaatggagagaatcgaacagtagattatacgtataataatcgtggagaatatacacatatttattctccgggagttattgattttttatatcaatatgatcatcgtgatttgatgctttcacgtaaagaaaagttttatacagatgatttatggaaaggatttgatgagtatttcagctatgatacttatgaaagacttattgcatctgaaagaaaaggaaaaacaggccaagaggtttcatattcttccggttatcggattgcatcaaaatccgacatgggaacttatttatatactagcgataaatctcgaattcatagcatatccacagtgtcagaaagagattattatccttcacagatattaaccttttcaacaaataatcgtattgctacaatacaagaaaaagataagatatggacttatgattatgatgtgaatgagatgcgtgcaaaagcggtgttggaagaaaatggtattgtacgattaactaaatattatttttctaattatgaaaaagaatgtactgataaccaatcgactgatattgattatatttatgcaggtgaaaatttggtagctttaagaaagactactgaaaatcaggtggctatatattttgtctattctgataatttaggttctattcgatgcttgactgattttcaagggaatgtagtacaacagttggggtatgacgcatgggggcaacgtcgcaatccattgactggcgagaaattgacttctatagaattgatcgattcttatcgtattacgcgacgtggatttacaactcatgagcatattgatgaaatgaacctgattaatatgaatgcgagaatctatgatcctttaattggttgctttattagtgttgatcctcacgctgccatgaattatataattaatccttatacttattgtaatggcaatccattaaaatggattgatttaacaggagaagatatgtggagtacgtctgaccctgacttgatagaccggatgtttaatttatacaaggatggccagaatatgtttggcaaaccttattctgtaagtaatgattggttttatctaactcatgatgagtttgttagagcctatgcagtatatggagttgctgtattttcttacaatggtagctatgacttgagtagttatgggactataagtgatggggaaatcacaattcatgggaagcttccgaaaaaagaggaaactggcattcctagtgtaggtgatgcttattctatgataaattatgcagtagggacatatactggaataaaagcttactcgcgtgtacatgatggaatgtggcgtggaatggatggtaaatggtacaaaacatcttggggaggtaaccaatatacaggggctcgtagtactgtgatgaaaaaggctctacgtttagagaaaattggtaaatatatgttctgtcttgatgctgtaattaatggagttgtaatttggaacaatgcttctgaaaataattacgaacttatattccaatcttcggcaaatattgttttcggatatatttctacttatggtggacctcctggaatgattgtgggaacaatgtattattctatgactttcgctcctcatggatttacattttgtccgataacagaaccgactttctgttcatctgataatacttatgttgaaccatataaaaaaatatattgagaatgaatatacttaaacaaatatatgagatatatgaatatctgttttatcgaacatatatatggcagcttagattgtggggagaaaagcggtcgccagaagtagcagggttattactaccgacctcattgtttacttttgtttttgttggcccaatagttggagtattacattcattggaagtacaaaacaatgaagagttaggtatacttttggctgttatattcacttttgctgctcatagattatttgttagcgatggacgatatttgtctattgctgataaatatcgtaatgaaactaaagaaaaacaacgacaacgtatgaaacaagtttggatttttttagcaataaatcttatttgggtaatattctgtatcttcttattcatcaaagtgatacccccgccatcaaatgcagatacttctaataagaatccttctccagaatatatagagatgctgaaagatataagggaccaacgaccacaatagaatatgaacagtgaaataaatttgttgtataatagattataatttagaacttagaaaatgagaattattttatttttattagtaggttggtacacaatcgggaatatacaagcacaaatcaaagagcctgtaaagttcaaaaatgagttgaaaatgacatctgaaacggaagcggaaatcgtgtttactgcttcgatagagaaaggatggcatgtgtattcgaccgggctaggggatgatgggcctatttccgctactttcaacatcaatgcgagtaatcatgtagaaacaatgggtaaattgcaacctgttggaaaagaaatcagcatctatgataagatgttcgagatgaatgtgcgctattttgaagatacggtacagtttatccaaaaagtgaaatttgcaggaaatgattactttatggatgggtttctggagtttggagcttgtaacgatgaaagctgtttacctccgactcaaattccttttaaatatgggaaaaaagcagaagcagatttaatagttgcaaaagggaaagaagaggctccggtaaatgtggtagagaagcaatcggaaagtgatctttggaaaccggtaatcaatgaattgcaggtgttaggtgaagaacattctcaagaggataaatcttggttgtatgtctttgtcactggatttcttggcggattattggctttgttcactccctgcgtatggccgattattcctatgactgtgagttttttcctgaaaagaaacaaggataagaagaaagggattcgggatgcatggacttatggtgcttcaattgtcgtgatttatgtaacactgggattagcaattactttaatatttggtgccagtgcattgaacgctttatcaacaaacgccgtattcaacatccttttcttcctgatgttggttgtttttgcagcttctttctttggggcatttgaacttactttaccttctaaatggagcaatgcagtggacagcaaagcggaagcgacgagtggcctattaagcatttttctgatggcatttacgttatctctagtgtctttctcttgcacagggccgattatcggctttctgctcgtacaggtttctacgacaggtagcgtgattgctcctgctatcggaatgttaggttttgccatcgctttggctttaccattcacactgtttgctctttttccttcgtggctgaaatcaatgcctaagtcaggagggtggatgaatgtaattaaagtgacattgggttttctggaactggcttttgctttgaaatttttgtcggttgcggacttagcctatggctggagaatcctggatagggaaactttccttgcgttatggattgtgattttcggactgatggggttatatctattgggaaagatcaagtttccgcatgacggtgatgaaaacagggtaggcgtggggcgcttctttcttgcgcttgtttctttagcatttgctgtatatatgattcccggactttggggggcacctttgaaagctgttagtgcatttgctcctcctgtgatgacacaagactttaatttatattcgaatgaggtccaccccaaattcaaggattatgaaataggtatggagtatgcacgacaacaaggaatgcctgtgatgatcgattttaccggatatggttgtgtgaattgtcgtaagatggaggcggctgtgtggacagatagtaaagtgggtggtatcatcaatgataagtatgtacttatctctttgtatgtggatgataaaactccattgaatgagcctataaatgttgtagagaatggaacggaacgcactttacgaacagtaggcgataaatggagctatctgcaacgggtgaagtttggagcaaatgcccaacctttttatgtattgctggataatgacggtaatccgttgaataaatcttatgcatacaatgaagatattccaaaatatatagagttcctgcaggaagggctggagcgatatgtgaaatgatggatattagacattcagcttgtatgttatggcttatagctaaagtttggaatgagaaaaagaataattctttttgggcattttcatagaaatacatagaatagtgttatctttgtaaagtgacatcgggtttaatagagcaaattgtataataatatttgtgtctgacatataagcagcatgagggcgaaaatttctgctgtgatgctctgaattacatgatctgaaaatgtgaatgttgcccttgtcaagatgggcagattaagataaagatccctcgtggatcggctgcctgtgaaggtcgctctattgtttgttttgtttgtgttttggtgcaccttttttctgataaagaataaggtgcactctttttatagttatgtatatgtaatattaaatatatttttgaagaaaaaaaaagatgggtgaaaaagcttcaatgtggaatctatggcacggctgtcacaaattaagtgaaggctgccgacattgctatgtataccggacggatggtaaatatggaaaagacagttcggtggtgacaaagacagaaaagttcgatttacccttgcagcgtaaaaagaatggtacgtataagataccttcggggaatttggtatatacctgttttacttcagattttctcattgaagatgcggatgaatggcgtgccgaagcgtgggagatgatgcagatacggcaggatcttcgtttcctctttatcactaagcggatagaccggttgcaacagtgtctgcctcccgattggggagatggctatgacaatgtgaccatctgctgcacgatggagaaccaagatagagtggattatcgtttacctatttataaagaaatgcctattaaacataaaatcattatctgcgagccgcttcttagtcggattgatttcagaggtgagctgggagagtgggtggaacaggtagtggcaggaggagagtcaggcaaagaagtccgggtatgtgattacgagtgggtattggatatccggcagcaatgtatagatgcgaatgtcagtttttggtttaaacagacagggagttatttattaaaagacggacatgagtataaggttgcacgacaatttcaacattcgcaggcgagaaaggcggagttgaattatacacctgataaataagaaataaagattaatacagatctttttttactgaaagcgagggttgcttagcaatcttcgctttcgttttattgagtacaaaatacggataatcacgtctttttataaagatattgtgtaaattttaaattatccatattaatgaaacagataaaactgttacttcttttagcttccgcctccgttacgggagcacttgcgcaaagcaatggattgacggatatgagtcagagccgttttgcgaagatggcgaataccggaatcagtgccgtacattggacagatggattctggggagatcgctttcaggtatttagccggacttccctgcaaagtatgtggaacacttggaacacgccggagatctctcacggtttccgtaattttgagattgctgccggtgtgtgcaagggtgaacattggggacctccgttccatgacggagatatgtataagtggatggaaggagtggcttctgtctatgctgtcaacaaagatccggaactggataagttgatggataactttattgcttgtgtcgtaaaagcccaacgtgcagatggttatatacatacgcctgttgttatcgaagaactgaataaagggattgactctcatgcattggaggatcagcataaacaaacggtcattggaacgaaagtaggtgacgagaatgaaaaaggagcttttgccaatcggctgaactttgagacatataacttgggacacctgatgatggcgggtattgtgcatcgtcgtgccaccggaaagactactctttttgatgctgccgtaaaagcaacggattttctttgccacttttacgaaacggcttctgccgaactggctcgtaatgccatttgcccttcacattatatgggagtggtcgaaatgtatcgtgccacaggaaatccccgttatctggaactttcgaagaacctgattgatattcgcggtatagtggaaaacggaacggatgataatcaggatcgtattcctttccgcgaccaatatcgtgcaatggggcatgccgtacgtgcaaattatctgtatgcaggagtagcggatgtatatgccgagacaggcgaacaacaattgatgaaaaatctgactagtatctggaatgatattgtcacccggaagatgtacgtgaccggagcttgcggtgctctttatgatggaacgtcaccggacgggacttgctatgagccggatagtattcagaaggtacatcagagctacggacgtccttatcagttgccgaatagtacagcgcacaatgaaacatgtgccaatatcggaaatatgcttttcaactggcgtatgctggaagtgacaggggatgcgaaatatgctgaccttgtagagacttgtctttataatagtgtattgagcggtatcagtctggacggaaagaaatatttctataccaatccgcttcgtatcagtgcggatcttccttacacgcttcgttggccgaaggaacggacggaatatatcagttgtttctgctgcccgccgaatacattgcgtacattgtgtcaggcacagaattacgcctacacattgagtccggaaggcatttactgtaacttgtatggtgcaaatacgctgactacgacttggaaagacaaaggagagctggcattaacacaagagacggattatccctgggaaggaaaggtacgcgtaacgttggatagagttcctcgtaaggcgggtgctttctcgctcttcttgcgtattcctgaatggtgcgaaaaggctacgctcacggtgaatggacagccgctgcaaaccaatgcaaaggcaaattcgtatgcggaagtaaatcgtacatggaagaagggggatgtagtggagctggtgatggatatgcctgtccgtttgctcgaagcccatccgttagcagaggagattcgtaatcaggtggtcgtgaagcgcgggccgttggtttactgtctggaaagtatggatattgcaaacggggaaaagattgataacgtattgattcccgctgatataaaactaactccgaagaaaatcacaattgaaggcagtccgattgttgcacttgaaggaatggcacgtctggcatctgcaacttcgtgggaaggagtgctttaccggccggttgttcaggctgaaaagacagtaaatatccgcttgattccttattatgcctggggaaacagaggaaagggagaaatgactgtatggatgcctcttgccagatagtccggattgtttagtatacagaaatgaaaaaaatcatgaaaaagttatttgtaacggctatatgtatcttgtgcagccactggctattggccggtgagatatggatttctcccaagggcagtgacttcaacgacggaactcgtcaatctcctaaagccacgctgacttctgccttgcgacaagcacgagaatggcgcaggacagaggataaccgtatccaaggtggaatcacaatctatatggaaggtggaacgtatgccttccatgaaccggtttttatccgtccggaagatagcggaaccaaggaatcgcccacaattattcgttcggtaggcgatgaaaaggtgatattgagtggaggaatcagcataaaaggttggaagaagcaagggaaagtttgggtagcagatgtcccggcatttaatggacgtccattggatttccgccagttgtgggtgaatggaaaaaaggcagttcgtgcccgtgatgtggaggatttcgaaaagatgaatcgcatttgcagtgtagatgagaagaatgaaattctttatgtacctgcagtttccattcgcagacttattgataataaaggaaatttgaaagctaaatatgccgagatggtattacatcagatgtggtgtgttgccaatcttcggattcgttcagttgaagtgcagggagacagcgcggcaatacgttttcatcaaccggaaagccggattcagtttgagcatccctggccgcgtccgatggtgacgacggacggacataattctgctttctatctgacaaatgcccgcgaattgcaggatgtacccggagaatggtatcatgatatagatgcccgtaaagtatattattatccacgggaaggagagaagatgcaggaggcggaagtgatcgtgcctgccgttgagacattagtacgggtggaaggaactttggatcgtcctgtgtgtcatattcgttttgagaaaattactttttcctatactacatggatgcgtccgtcagaaaaaggacatgtacctcttcaggcaggtatgtatctgacagatggttaccggattgatccgaaaatgcaacggaactacttgaatcatccgttggataaccaaggatggttgggacgtcccgcagctgctgttcgtgtggttgctgcaaggcagattgatttcgagcggtgccggttcgagcatttaggctcaaccggattggattatgaagaagcggtgcaaggcggtgttgttcgtggctgtctcttccgcgatattgccggaaatggtctgttagtcggcagtttttctccggctgcccatgaaacgcatttgccatacaatcctgctgatcgtcgggaagtatgcacacagcaacaaatcaataactgctatttcacggaaataggcaatgaagattggggatgtcttgccattgctgcgggatatgtaggggacgtcaatatcgagcataatgaaatcagtgaagtgccttatagtggcattagtcttggttggggatggacgcaaactgtgaattgtatgcgtaataacagagtacatgccaatctgattcatcattatgcgaaacacatgtatgatgtggcaggtatttacacactcggttcgcagccgaaaagttatgtaacggagaattgcgtgcatagtatttataagccggggtatgtacacgatcctaatcactggttctatctttatacggatgaaggttcttcctttatcactgtacgtgataattggacagaaggagagaagtatctgcaaaatgccaatggtccgggaaatgtatgggaaaacaatggcccgaaagtggatagtgttattcgtgaacgtgcgggactggaagcaggatataaggatttactaaatatccagtaggtattgacaagtcatttaactgtaatacgtgattcgttccacagatatggaactaaaggaaaacaattgtagaactaaagggaaacagatgtggaactaaacgtcaaccactgtggaacgaattatttcttacgattcagtttgttagtaatagaaagaaaaatgaaaaagaaatatatgatattgcttagtgccttgtctttggcaagcagcacatttgcccagacctggatatggtatccgggagactacgaaatctggctgggaaatcaaatgaataaccgtcgtacggaacgaggtgcattttttcctcctttttggaaaacggacagtcattatgttgtcgtagaattcagcaagcaactgaatctttccgagccggaagaaatttttattgctgccgaaggaaagtacaacgtcaaactggatggaaagctccagttcggtatgccggaaaccatgttgcttccggccggaaaacataatctgaacattaaagtctggaatcaggcaactcctcccactatttatgtgaagggaaaaacagtgaattcagactcttcctggcgtgtaacttacgaagataaagaatggattgacgagagcggaaaagcgagtgacacatctgccactatctatatggatgccggatgctggaactttgacggagctacccaacgtccttcccaattcagtctgatgcgtgaaccgcagcaacctgttacgaagacagaacagtccgaaggaggtatcctttatgattttggaaaagaaacattcggattcatcacattgaagaatctttccggaaaaggaaaaatagaaatttattatggtgaaagcccggaagaagcaaaagataaagcatattgcgaaacattggacaaactcttgctcgaaccgggacaagtgaccgaccttgctatccgcagcacttctcctttgagtaattctgaaaacgaatatacattggagaacagcaaagccttccgttatgtctatgtaactcacgagccgggtgtacagattggagaagtctccatgcaatatgaatatcttcctgaagaataccgcggaaatttccgttgcaatgatgaagaactgaatcgtatttgggaagttggcgcatacaccatgcatctcactacccgcgaattcttcattgacggtatcaaacgtgaccgttgggtatggagtggcgatgccattcaaagttatttgatgaattattatcttttctttgataacgaatccgtcaaacgtacaatctggttacttcgtggcaaagaccctgtgaccagccacagtaatacaatcatggattatactttctactggttccttagcgtatatgactattatatgtatagtggcgaccgccattttgtcaaccaactgtatccacgtatgcaaacaatgatggattacgtgttgggacgtaccaataagaatggcatggtagaaggcatgaccggcgactgggtatttgtggactgggcagacggctatctggataaaaaaggcgaactctcttttgaacaaatcttattttgcaggagtctggaaacaatggctttgtgtgcggaactggttggagatgccaatagcaaacagaaatacgagaaactggctgctgctttgaaagcaaagttagaacctgccttctggaataaccagaaacaggcatttgtacataactgtgtcaacggtcagcaaagtgatgcggtcacccgctatgcgaatatgttttctgtcttctttcaatatttgaatgaagataagcaacaagccattaaacagtctgttctgctgaatgacagtattctgaaaataacaactccctatatgcgtttttacgaactggaagcactttgtgctcttggcgaacaggatgctgtaatgaaagaaatgaaagcctattggggaggaatgttgaaggaaggagccacctccttttgggagaaatataacccggaagaaaccggaacgcaacatcttgccatgtatggccgtccttatggcaagagtctgtgccatgcctggggagcgagtcctatctacctgttgggcaaatattatctgggagtgaaacctgtaaaagaaggatataaagagtttgctattgctcctgtgttgggaggattgaaatggatggaaggcactgtccccactccaaatggcaatatccatgtctatatgaacagcaaaacgatgaaagtgaaagcaacagaagggaaaggctatctaaccatcaaaagccgtcgtccacctaaagcaaatatcggaacaccagaaaaagtgtcggtaggagtatggcggctctggatcgattcacccgaagaaagaattgttacctatcatttataatacattgttaattagttagtggagtagtccttgattaacggttcctctttttaatgggggattgttaatcggggacttttttcgtaaatacctctaggttttctaaggaatttgctacatttgctcttcataaagagagaaacatttagttcttttggaaacaagtaaacaaaatccgaagaatgaaaaacaagattgaccaatatactgatacagatgatgagaaactcttcgccttgattgaacaaggtgatgaaggagctttcacccaagcctatgaaaggtatcataaactattatatgtattagcctatcgttatttaatgagttctgatatggcagaagatgtagtgcaacatgtctttagccgtttgtgggaatttcgttcagaactacgtgtgggaatcagcctaaagaactatctctttacgatgacaaaaaatcatgtcttgaacttgattcgtaatgaaaacagcgcgattgcaaagaactatgagatggcacaatccgcttcgccttacgaagataatctgatagaaaaactggagaaaaaagagttgatgtccagtttttataaagctgtggatatgcttcctgcgcaaaaacgggatatttgcttgatgaaagtacaagaggaactgacaaatcaggaaattgcggaacggatgaatctatccgtaaatactatcaagacgcattattcggaagcgttgaaacttctccgtatccatctaagtaagatgttaataattgttgcatttaccacactaatgacttttttgagtgtccatttaataaagtgataaaaatgaatagacctactgataaacaaatagaagaagtcttggcaggaattgccagcccggaagatgcaaaatatgtggcagagtggtttgctacggaagaaggtagcgactatcttgaagctgctatgacacaggattccgaactgataaaaaatgagtttgcagacttgtatgtagaccatgatattccttcaaagaaaatattagaacagatacggaagaacattcgcatcaagaagttgaagcgtgtctgtttccgagttgcagccgtattgatacctgttgtcttaattgtcggactttatatacaactgaactcaaaagtcgacctgttcggcacttccgaatatgaggaagtggtggtagataaaggagaacgcatacaaatcatgtttcaggacggaacaaaagtatatatcaattctgattcgaaactaagatacccgaagaagtttgctttgaacacccgggaagtttatcttgaaggagaagcctatttcgtagtagctaaaaataagaaccgtccttttatagtcaatttaagtggaccggcaattcatgtattgggaacttctttcaatgtacaggattacccggagaataaggatatagtagtatgtctggatgaaggaaatattaatcttacccttcctacggaaaagaaatacccggtgcaacccggcgaaagattagtgtacaacaaagataaccagcagtgtactatttccaaaatgaacgatatgcaacgcctatcgatgtggaaacagaatgtgatagtatttaaagataccccgttgccggaagtcattaaaatattgaaccgctggtataatgtagagtttaaagtcgaagatgaaaacgttttgaagtatgtctatacattgacttcggacaatacattattagagaaagtattaatggatttagagaaaatcgctccggtgaagtttgagtataatgaagataagaaagaagtgatagtaaaaatgaaataatataatcattagaaataaatggggtatatgaataaagaagtggatttatccgtatcttgttatggaaaagtaaaagacaggaaatatgatattgtgatattgccgtggggagctactgaacctcataatctgcatttgccatatatgacagattgtattctttcccatgatgtagcagttgatgctgcattgatagctaaacagaaatatggcgtgaactgcatggttatgccacccatcggcatgggttcacaaaatccgggacaacgggaacttcccttctgtatccatacgcgttatgaaacacagaaagcaatactgactgatattgtttcttccctttatgttcaaggtatccgaaaattggttattatcaacgggcatggaggcaatacttttaaaagtatgattcgtgatttgtcggtagactatcctgacttcctgatagcatcgagtgaatggtacaccgtgttaaaggtaaaggactattttgaaaatccgggtgaccatgcagatgaagtcgagacatccgtaatgatgcactatcaccccgaattagtcaatcttgaagaagcagggaatggagaatataaaacttttgccatacaatctttgaatgaaaaagtagcatggattcccaggaactgggggaaagtatctaaagataccggtgttggcgatccacgtggagcttccgtagaaaaaggaaagaagtttgcggaagcagtcgcagagaaatatgcaaagctctttgacgaattggtgaatcaggaactttactagattgcaaaaaatatagtgacgctatccttttgtgatagtgacggtatccggtaagtatagcgtcactatgtgaacaggataccgtcactatcacaaaagactgtttctagcgaattgccaagaacacgaatctattgttataagtccttctgaaaataaaatccggaaggacttttctttttatatcccattttcctacaaataaaaactaaactatatcttgctgaaaactaatgtattatcatacgaaaatttattggaaataaaaaaacttcagaaaaaaacgttttttccctcacccgcttcttaatctcgtgtgtccactaaatacaaagagattaagaacctatttataactttaaacaaactaagtatgaagaacaaagtattgcttgtattgttattgagctttgctgtaagtcttgcggcgtcggctcagaaaataacaatgaatcttcaacaagtcaagttggagaaagtcttttcgctcattactaaacagacaggacttacggtagcatatagccgtacgattgtcaatcccgaacggattgtttctgtccaggcaaaagacaaagacctttctaaagtattggatgatttattcgcaggtacaaatgtagcttatgaaattggagagaagaaaatatatttgaaagcaaaagaagctcccgttacatcacaagggagccaaaaaacaaagaaaataacgggaaccgtgacagataccaaaggcgaaccagtaattggtgccagtgtattggtgaaaggagcggggacaggtactgtgacagatgtagatggtaactttacattggatgctccggcagacgctcttctggctgtcagttatattggttataaaacacaggaagtaaaggttgggaataagaactcatattctatccaattgcaggacgacaccgaagtactggatgaagtcgtagtagttggttacggcgtgcagaagaaatcaagcctgacaggtgccgttgcttccatctcttctcaggaaatcagcaaacaggtatcatctaatgttgcttcaagcttacaggggcgtacaccgggtgtagacatcgtgcagcaagctggtgttgctggggcagatgtaaacatcgtgattcgcggtgccgcttcttttggcgctaccgaacctctgtatgtcattgatggagcattcagtaatgccggattaagctcattgaatcccaatgatattgaatctatcgaagtactgaaagacggtgcggcagccgctatctacggttcacgtgccgccaatggggtcgttttgattactaccaagaaaggaaagtccggtaagcccgtcattcagatagacggttcgttcgctttccagaaaacgactaatattccggagttcctcaatgcatcggaatggagagagtttgccaatatggtggcagataacagtggcttgcctcatgcaccggagaatgacaatcccaccaatccgaacctgaataccgactggtcagaagaatggatacagtttgctccggtatggaatctgaatgccagtatcgcagggggtggggacaactctactttcagcacaagccttggttatcttgaccaaaccggtatgacgatttattcggattataaacgttataacttccgcctgaatacctcttataaaaaaggacgtttctcattttccgaaactctcggactgacgcataaggataaaactcctacaacagctttcaacatagctttaccaacgttacctatttatgatgaacaaggacggtttacctctggtggccctgattattacatcaaccccgaagatggcaaggcgcagaataagatagccccgttacattatacagaccagtttaataaagtgacggatttaatcggctctttaaatgcccaactggatatttggggcggcttaaaatacaaattatcgttaagtggaaattatagcaataagcataattacacccatacccccgagtactatacaaagtggaactcggatggaactcccgataaagattatggcaacacacgtaacagtgtatcggaaacaagaggtgaagagttcacttatacgattgataacttgctgacttacaacaagacattcaaccgtcactcaatagacgctttattaggaacaagctggatgagagaatactatcgttacatgaccaactctaccattaacgatttgggaggaacggatattaccggattccaaaatgaagatggtaagatttcggcaggagacagtaatgcggcattgctctctttcttcgcccgtgtgaactacgattatgataataaatatctgctatccttgagtatccgccgggatgaatcttccaaattccataaagacaatagagtaggttacttcccctctgtctccgccggatggaatgtgcaccaggaaaaatggttccaaaatcctgtaatgagcaaattgaagatcagggctagctacggtgagttgggtgccaacttcctcaatccttataattttgacgcgatagcttatggacctattccttacacagtaggcggtgaacgttatgtgacaggacgcgcagcctatctgaaatcgaaagacttgaaatgggaaactgccaaaaccacagatattggtatcgaactgggcttcttcaacaacgacttgaccttgtcattagactatttcgtaaaaaagaacgtagatttgttggcacagatagacttgaacttgtcttccgggcaaatctttgaaattaacagttcacgtgaaaaaccctacgttaatacagcttccgtaaaaaacacaggatgggagtttatgatgaattacaggaaacaattgacgaaagacttccatatagatgcaacattcaatatcgcaacgttgaagaataaagtattatcattgggagaaaacgtgcagccgattacttccggagcaatgtccagctactttaacgatgctccctctattaccatgccgggagaagctatcggttcattctatggctataagattgacggttttgatgcagaaggaaatttcatatttgcggatatggacaagaatggagtagtcaatgcaaatgataaagttattctgggcagccctatccctgacttcacatacggtttgaacatcaacatggaatacaaagactttgatttgactctcttcttccagggagtgcagggaaatgatatattcaatcagaaaaagtacacctattattttgattattccaataatgtggtcaaagaggctatgaatggatggacgaaaacaaatagaaatacaggaatccctattatgaaaacccaaaacacaagtggcggaaattccctgccgagtgaattttatattgaagacggttcctatttacgtctgaaaaatcttcagcttggttattcgttacctaaaaagtggttggaagcaatccggtttaacaaactgcgtgtttatgcaggcgtacaaaatctgtttacgctgaccaaatactccggttatgacccggaagtcagttcaaatgtattgttctcacgtggcattgacatcagttcatatcctaatgcccggacattcacttttggttttaacgcttcattctgataactaaaaatatgattaatatgaaaaactataagaaagtatatgccgcatttatcttggcgggcggcttgatattacacggatgcaacggtatctttgatgacctggcaattaatccgaaccagccgagtatgggagcttatttcaccagtccgtccgctgtaaatgacgcagtgatgaccatgtacggatatatgtctacgcaacgctgcctaggagcttccggctctaagacaacgataatccgctctgacgaggcatcgtccaattcggattatggcaaaccgggcatgtttggtgccgacttgaatgccagttattacactattgagcaaccttatacattgatgtacaccactgcttcccaagcatcctacatcattgaaaccgccccgtctgtcgatttcagcggcaatgaggaactgcggaacgcatacatgggtgaagcctatttctggagggcatttgcgcattattacctattgattaatttccggaatatatctcccatcagacagatgccacgcaatggagatgactatgtccgtcctttggaaaaacctgctgccgtatgggattttattcaagaagacctggcacacgcgaaagaattgttgcccgtgaagggatattgggacagcaagaatgccggtcgtgtgacaaaagcttccgcagccgccttattgggaaaagcttacctataccgtagtggaatcgagcaatattatggtgaagacaagactacattttacagtgaagctgccaaagaatttggtgatgttatagacggaaagtacggaacttatgacctgactaaaaattatgccgataattttgatgtcgctcatgaaaataacgaagaatcaattcttgaatttcaattcctaggcgatgtcgataatgcaggattcaatccggggcttgccacttccggtttggcgttcgattcacgtggactgatgttgccgggagcgggagtaggttatgaaggcgtagtacataactggctttataacgcatttgtgaattcggtagacaaggacggctatacggatatccgaatgttctccacaatgatattcaatgatttggatgcgagcattcatttgagaaatgatgcaggcggcaatccggtacgtctggaaggtcccggcggttataaatgggaagaactttatcctgcaaagaatggaaaagaaggatttgctaccgtgtccaatcctttggcacattcattcaaagcaggtataagaaaagggattgattgttccatgcctacacaaacggaagcagacgggactcctaaactggtcggtgtaggtgcaggcgttaaggagtatgtatataatcagccccgtgcccatggagtgaattggcgctatatccgctatgccgatgtgttgatgatgtatgcggaagctatcgttagcggtggcacgcaagcatcaaacatgactcccttgcaggcggtaaataaagtacgcggacgtgtcaacatgagcgaactcccttcggtaaccatgactgatattcagaatgaaagaatcctggaatttgctttggaagggcatcgtttctatgatttgctccgttggggcaagctagccagccgttttacagagttgcaggaatccgatcctaacttcaagaagttcatatcggcagatgactttaaaggattcgtcaccaataagcacgaatggttgccgattcctatcaatgaagtgaattctaacccttatatcacagaaaataatccgggatattaactaagaaagaattagcatgataaatttgaaaaatattgcggtactactgttcagtttggtagtaccggggctcgctattgcccaaacagaagtactttacaatggcatacacctgcctgaacaatggccaccccgctatgcggaaccacaaaaagcacaagatatgccgataccctatcttgaacaaaagccgggagtaattcctgtaaatgtaggacggcaactatttgttgattcttttctgattgcagaaactaatttgaatagagtgattcatactccccggttctacgaaaggaatccggtactcggacctgataaggaatgggaaaagacaaccgaaggcggactctacgctgcacccttcagtgatgggatctggtatgacgaaaaagacgggaagttcaaaatgtggtacttggcaggtgcaggtgttcttcacaaaggagacaatcagaccttttataccggatatgccgaatcggaagacggcaagtactggacaaaacctgtactggatatttggaaccaaaccaatattgtagatacctgcaatcgtgacgcagctactatttggctggacaaacaggagaaagacccgtccaaacggtacaagatgttcaatgtcgaacgccgccccaccgaccgcagatggcaatttattttgaaatactcatcggacgggattcattggggagagggagtcgcccagtccggtgatttatacgaccgttcatccgcattctacaatccgttccgtgatgtgtgggcattgagtatgcgttacgggacaacagtttcttcccgctcacgcagttatttggaaaataaagacccggaaatggcagtaagtttcgcacatcgtatccgaaaaggagtacctgataagaatatggtctactggtttactccgagcgataaagagccgcgtcatccggagtttccggaagtagaaccgggtatttacaattttgatgccattgcttatgaaagcattatgttaggattgtacagtgtatggcagggaccggaaaatggagtttgtgccaaactaggtattcagaaaaagaatgaaatctttctagggtatagccgtgacggcttccatttctatcgtccttctttcaagcctttcatggcagtgaatgagacggaaggagcatggaactggggaaatatgcagtctatcaatggagtgcctttgatagtaggagattcactttatttctattctagcggacgccaaaggaacaagattatgtgggatagctatacatctaccggactggctactttgcgcagagatggttttgtctccatgcatggagataaggacggctatctgctgacagagaaggttcgttttgacggcaaacatctttttatcaatgcagatgtaaaaggtagcttggctgtagaaattctggatgaaaatggaaagccattagaaggattcacacggaaagactgtgtaccgatgaagaaaacagataaaacaaaattgttggttacatggaagaaacaccagaatatagcatcacttatcgggaaggctgtccgtttgaagttctacctggataacgctgatatatatgcattttggatttctccgtggcaaacgggcgaaagccgtggatatacaagcggcggcggaccgggactgtcaacctgtggcatagatattcctgcaaacaaataaaagataaatgactatgaaacgtttattttatacattactatttttcctgccttgtatgctgatagcttgcggtggcagtgatgatactccggatggagataataatcccccggtagtggctcccccttgcgaagagccggtagattcacggctattgtacaatggtattcgtctgcccgaacagtggccgccggtacgttcatcttcgtctgaactggaaaaaggaatgtcacctttttatctgtcggataaaccttctgttattaatatctcggtaggacgccagttatttgtagacaatttcctgatagaatccactaatctgaaacgtacgttctattatcctgaatattattcaggcaatccgatactgacaccagaacaggattgggagaaaactggaacaaaaggtgcggcattcgccgctcctttcagcgacggggtatggtatgacgaaaaggaaggaaaatacaaaatgtggtacatggcaggtggtggctcctatgcaactagcggagcaggagtgacttgttatgcggaatcaacggacggtattcactggacaaaacccactctttccgttgtagccggaacaaatatcgttgactataactcagaacgtgacgcgtctgttatttggctggataaacaggaaagtaatgcttcgaaaagatacaagatgtttttagttgcccgtgaatccgggaaatggagataccattacaagacttccccggacggcaaagtctggcgtgccgcagttcaatcggaaccgattgccgaccgttcaacagtatataaaaatcctttcagaaacgtttgggtatatagtatgcggcataatgttcgggtggatgcgaataagctggtacgtgcgagggattataatgaaaacaccgatccggaagccggaacaaagaaagcggaagcattattgagtgcattctggtttggtccgtgggctaatgagcaacaccatacagactatccgaatatagcgcctgcgatatataatcaggatgccacgccttatgaaagcattatgctgggattcttctccgtttggcaagggccggaaaatgatgtttgtgcttcggacaacgtaatcaagagaaatcaagttatggtaggatatagccgtgacggttacagttggttccgtgaggatatgaatcctttccatgccgtaaatacgaccacctcggacgcatggaatcaaggtaacctgcaatccgtagccggagcaccgttaatagtaggtgacaaactctatttctatctgagcggtcatcgtttgagaggcactcaagagattaccactaccgggcttgccatgcttcgtcgcgatggatttgcatctatgaaaggaacaggagagttgcaaacttccttactgaaatttgacggttcgtacttctttgtcaatgccaatgtcacgggagaaatgaaagtggaacttttagatcccaataataaagtaatcgaaggattctcaaaagatgagtgcaaagcctttaaaggggataatgtaaaagcgaagatagaatggacaggcaacgcttcattagcctctttgaagaacaaacaactgaaagtgaaattctatattgataacggtgaaatatttgctttttggatttctccttctgcgaatggagagagtatgggatacaccgctggcggaggtcccgggttgaatatttccggaatagataaaaccaattaaaaaatgaatactatgaacagattagcttatttattatcattgatttgtattcttgcattttcttcttgcgaagaggataaagtatattatcacactgcggcaaaggcagacttcaccattggtgagaatatgtatgaactgggacagactgctgtttttaaagatgcttccatacccgatgaaggaagccggatagtagcatggttatgggagtttggcgatgcaaaaaaatccgtctcgacggaacagaatccaactttcgtttatccgtcggacggtacatttaccattaaactgacggtgactgatgataacggcttgagcgccacagctaagaaggaccttaccatcttagacccggctaaagcaatcaatgtaatgtggcagaaagaaatgggcggacctattgaaagtacagtctcacccgcattgtcggctgacggtaaaacggtttatatgattaccgaccagacttccacaggagcatttgacgtgaaactttatgcttatgatacagaaaacggaacacagaaatgggcatttgacgtaactgccaatatgaatgaactgaatccgggcggaggggcaagtatggtatatgcaagtccggcagtaggaccgaatggagatgtgtatattgtggttcgtgatttgaagccagctactgctgaacacccccgtgctttgtttttatttgctgtaggaagtaatggtagcagaaaatgggcatacaaagctgccgattctaatttgtatgctgtcactccggctattgatgcatccggtaatatttacttcggacatagaggaaagaaaataatcgtattaagtcctgccggtgatatagtcaaagaaatagctttagatgtagaagtgttgtccggtatgtctctgtccaaagacggaactgtctatttcggctcttccaagaatacgggatatttcggttatgattttgctaccggtactcaaaagtttgtctatcagaaagatttgggtggtacagcattgaaaggaaattcttatacgataggagcggatggaaccatttataccatagccgaactgacatcaggtggcgctatcatagctctgaatcctgacggaacggaaaaatgggtgtacaagactccgggagccattgtcaacggtggtgttgtgattggtacggatggaacgctttatgccaacggtggaaatgctgttgccggtgaagcttcggcaggtgttttcgctttgaattcggacggttctttaaaatggcattatgctacaacggaggacgttaacaactgcgtaccaatcatcgataacagaggatatatccatatcatctcgaacaaagccgtctattatatagtgaaacaagacggtagtttacttgcatccgcagagttaggcgttaaatgtacttccagtccggtaatggattcaagaggatatttatatgtcggcattgaagctgttgcaggtgcatctgatatggtatgtatctcatctggagctacttcctatgcgaactctggatggccgatgaaaggccagaatccgcaacggacaggtttgcaaaagtaagtagtttaaaatgtcgacgattatgaagaaatattctttattggcagttttcttattattaatgtgcaatgtttcggtatgcgggcaaacaggacgtatcctttttgtggatacaacattcattgagaaaacaaatctgcaacgaatacatcattcgcccatctattattctggcaatcctgttttgaaagctgataaaaaatgggaattgaatataaatggcgacccttatgccgctccattcagcggtggcgtatggtatgatgaagaagaacataaattcaagatgtggtattctgccggtggcggaaagttattaggactcgtcacttgctatgcagagtcgtccgacgggaaagtctggataaaaccggagctggacgttgttccgggaaccaatatcgtagatacattagagcatgattgcgtttccgtgttgcttgataaatttgagaaagaccggacgaagcgttataaaatgtttgttgtagaatttaataatcgcttcacagtcagcatgaaactcaaatattcttctgacggaatccattggagtgagccgaaagctctttcgggagaattgtacgaccgttgtgcggcttattacgacccgtttcgcaagaaatatgtcctgtcattgaaaaccataaatggagtgtataggcgttcacgcaattatttggaacatgaagatccggaaatgctggttagcctggcacataggatatatgacaacaagagtgataagtttatccgttattggtttaatgccgatgccgatgacccgcgtcatcctcaatttcccgaactgcgtccacagatatacaatcatgaagcaatgccgtatgagggctgtatattaggctacttcaccgtttggcagggaccggagaacaatgtttgtgacagtctgaacattcaaaaaaggaatgaagtcctgataggttggagcaaagacggttttcattggaaccgggaaaacaagaaaccatttcttcctgtcagtgaggactttcatgcatggaatgcaggcaatgtacagtctactgcgggtagccctctgatagtcggagactctctttatttttatgtcagtggacgctataacagcaagccgaaacatgattccaattttgccacaggacttgcgatgcttcgtcgtgatggttttgtttcgatgcgggcaggaagaaaagaaggatatatagaaataaaaactcagattccggcaaatggaaactatttgtttgtaaatgcagatgtgaagggaactttagcggtagaagtgttggatgataacggtcagccaatggaaggatttacaaagaaagactgcatatcaatgaaaaaatcggataaaacgaaacagatgatttcatgggaaaaacatccaggcgtaacatcactggtggggaaaacagtccggttgaagttttatctgaatcaggcggatatctatgcattttggatttcggcatggcaaacaggcgaaagtggtggatataccggcggtggaggaccgggactatcagacgagggtatagatacccccatggataaattgaaaaataactaaatatattaaacttaaaaaaagaaactgtattatggaaaagattataggattaatcaatgctccttttactccgttttatgaaaatggagaagtaaattatgaaccaatcgaagcctatgcaaagctacttgtaaaaaatggcttgaaaggtgttttcatcaacggttcttctggagaagggtatatgttgactgatgaagaacgaatgaagttggcagaacgttggatggaagttgcaccggatggttttaaggttattgtacacgtggggagttgctgcgtaaagtcaagccggatgctggcggaacatgcccagaaaatcggagcttggggaattggtgcaatggcacctcctttcccgaaaataggacgaatagaagaattggtaaagtactgcgaagaaatcgctgccggagcaccgaagctgcccttctattattatcacattcctgcattcaatggagcattcttatcgatgcttgctttcctgaaagctgttgaaaaccgtattcccaattttacgggaatcaaatataccttcgaaagcctgtatgaatacaatcaatgtcgtttgtataaagacggcaagttcgatatgcttcacgggcaggatgaaaccattcttccttgtctcgcaatgggaggggcgcaaggcggaatcggcggaacgaccaactataacggtataaacctggtaggtatcattgatgcctggaaagccggtgaattggagcaagcccgtgaattgcaaaacttctctcaggaagtgattaacgtaatctgccatttccgtgggaatattgttggtggcaaacgtatcatgaagcttatcggacttgatttgggcggcaaccgtactcctttccaaaacatgaccgctgacgaagaaaaacaaatgaaagcggaactggaagaaatccgtttcttcgaacgttgcaataaattctaacaggaggacgtatgaagaatattactgactatatacaacaatgggctaatacctataaggatgatatgcagaataatatcatgcccttttggataaagtatggactggatagagtgaatggtggtatatatacttgtgtagatcgcgacggtgcattaatggatagtacaaaatccgtttggtttcaggggcgttttgcatttacttgttcctatgcctataatcatatagaaaagaatccggcatggttgcaagccgcaaaaagcacactagactttatagagaagtattgctttgattcggatgggcgtatgtattttgaagtgacagcggacggtcgccctttacgtaagcgccgttatattttctccgagtcatttgcagccatagcgatgtccgaatattcgatagcgtcgggggataagacgtatgcggtgaaggcactcgaactgttcaaacgtatgcaatatttcctgcaaactcccggactgcttgctcccaaatatacagatacgctccccatgaaaggacattccatcaccatgatattgataaacgtagcttcccgaatcagggaagctattcaagacgaatgtctgacacggcagattgacgagtccattagctgtctggaaaaagatttcctacatccggagttcaaggcattattggaaaccgtaggaccgaacggagaatttatagactccaatatggggcgtaccatcaatccggggcattgtatcgaaacagcttggtttttgctggaagaatccaagctccggggaagggatcaaaacataaaagaactggggctgaagattctggactggtcatgggagtggggctgggataaagaattcggcggtattatcaatttcaaagattgcaggaatcttccttcgcaggactatgcgcaggatatgaaattctggtggccgcaaacagaagcaattatcgctaccctgtatgcctatctgatgacgaaagaagagaaatacctgaagatgcatcaacaaatcagcgagtggacatatacacatttcccggacaaagaatacggagagtggtatggctatctccatcgggatggaacagtcgcccagccggcaaaaggaaatttatttaaaggaccttttcatatccctcgcatgatgacaaaaggatatatgctttgtgaggaaataatgtctgaaataaaaaaagaaataagatgattgtatccaatttacaaaatagccaacgggtggagaaacttcacccgttgttcaaacagcttttcgattatgtgaaatcgcacgatctgttgcacgaggaactgggaactatcagactggatggtgataatctgattgtcaataatatctatcccgaatgtattcctgaaggaaagcgtttattagaactgcatcacgattatattgatgtgcacatattgcttgaaggcaaagaaaccattggctggaaagccttggaagaattaaaagtggaaaggcaagcttatgataaaaagagtgattgtgccctatatggtgacgttcctactactttcatcaatctcttgcccggacaattcgtcattgtatatccggaggacccccatgctccggctatcggtaaaggctggatacgcaaactgatagctaaagtaaaagtctaagtaaacagtctcaaaaatcttttaaatacaactaccatgaaaaataaaaatatttatccatgggtagtggttgcgttgctttgggtagtagcgttgctcaactacatggatagacaaatgctttctacaatgcaggaagcaatgaaaatagatattgtagaactgacgaaggcagaagctttcggtgcattaatggcagtctttctttggatttacggctttatgagcccggttgccggaattattgcagacaggcttagtcgtaaatggttaatcgtcggaagcttgtttgtttggtcggctgtaacattcctgatgggatatgccacgacgtttgagcaattatatggtttgcgtgcagtgatggggattagtgaagcattgtatattccttccgctctgtccttgatagcggattggcatcgggacaaatcacgctcattggcaattggagttcacatgaccggactgtatgtcggtcaggcaatcggtgggtttggagctacggcagccgctgcattttcctggcagagcacttttcactggtttggcattgtaggtattgcttattctgtggttcttatctttttcctgcatgagaatcctgtccgaatgaaaatagaaaaggttgttgctaatggcattagcaaggggaattcaattggaaaagggctgttactgttattttcaaatatttctttttgggtgatattattttattttgcggctccaagtttaccggggtgggctacaaagaactggttgccaacgctatttgcggagaatctggatattccgatgtcacaggcaggaccaatatctacgattaccattgctctatcttcatttgtcggagtaatattgggaggattcttgtcggatagatgggtgctgaagaatatccgcggacgtgtctacacaggggcaatcggactggggatgactatccccgcactgttattgttaggtttcggacacggtttcattagcgtaataggtgcaggattgttgttcggcatcggctttggtattttcgatgccaacaatatgcctattctatgccagttcgtttctgctaaatatagggggacggcatatggtattatgaatatgacaggagtttttgcaggagctgcagtaactcaattattgggaaaatggacggacggtggaagtctgggcgaaggatttgctatgcttagtattgtcgttgcacttgcattagggctacaaatctactttttaagacctaaaacggataatatggagtaatacaatgatagttatagtttgggttgttatgagtaataagaagaaaagaatattagtgtaaagctcatttattatctcaaatgtatagatatatttgtgaatattgcattcgtactattcttactcttaaactgttttctttttattatacaggatgctgataaactcaatttgcatttttaataaataatgaaacagtttattataaacgggtcttacatttataataaacgatattcgggataattcactaagtaggcacgaatatattaaacaaaatggggtgaaatccatgtagattccaccccatttctattctttcagacacatatttatgtttctgtaaattctctttatgtctttatttttgtatatatcatatctgttgtctgctaattggttattgcaaatatacgaaattaaaagaggaaagtcaatagcattttaaaatttgatgtgatacaacacatgcctgcacaacggatgctcaccagggacaagcggatgatcgaattccctcactcgttccattcctattttctgcattacacgttctgaccgttggttgagaagggaagtaaaagaaaagagttcttttatatccgttttattgcgtgtatattccaaacaagctgttgcagcttcaggagcataaccctgtccccaatattcgtgtgctaaccgccagcctatttctatgcccggagcaaagtctacatcaaatgcaatctgatgtagtccggtatagcccataaaagcatgatcttcttttcgttctacagcatacaaaccgaagccacaggtttggaactcattttgaatacgctgataaaaggcaaatgattcttccgatgacaatgaactaagaaaaaactccatcacattcggatcggcattcatacgggcaaaaaacgggatgtcttcttctttccagtcgcggagaatcagacgaggtgtttctatatacttttgcataataatgataataatggaatgcaaagatacaattcttttttccttgttggaggttattcattattataagtattaactattattcattgaatcccctcttcacttatggtcagtctagtcagcagcatggtacggatgtgtaaaccagaagcaggaacctattccttcggtcgaatccacgccaatttctcctcccatttgggaaacaatgcttttgcagatagaaagtccaagtcctgtaccctgaacaaaggtattgagcttcacaaaacgttcgaatatactcttttgcttttcttccggtattcccattccggtgtcgcgcacatagaattttattttctgatgggatacttgttcatatcccagggtgatacagccttgctgggtgaactttaatgcgttatttataaagttactgataacttgagtgaatctgtttttgtcagtgtagagataacattccggcagtggttcctcaaaaatcaattcaacacctttactcactttcatactcattgatttgatgatttcagcacacgtctcatttacatccacattggtatatacaaaattaaatgttcccgcttcgattttcgaaagatcgagaatatccgatatcagttgcaagagaagttcattattctcttgcacaatcttgatatattcctgccgttcgtttctgctgtccgtttctgccagaagactggaaaaaccgacaatagcattgagaggagtacggatctcatgactcatgttagctaggaaagccgacttcagacgatccagttcttccgctttatcgcgggcaataatcaatttctgttcagtttctttcaaaggcgtgatgtcataattgatacacaacatctcaataatgccgtcttgcggacggtaatccctgaccatcacattgatgctggtccatgtatatttgccattctccctgcatacacgaacttctttacgcaaactggttgcctttcccgttttcacttcacctacaaagtttttcagaacagcctgatcttcaggaactacatgtgcatatactccaataacctgtggcatgggagtaccttctttttcacccaaattcctgtaccatgtatcttgggcatatccgtctcttgtcaatacattgaaatgagcaaatcctaccttggcataatcaccgattagaagaaacagattctcaaactcctgtatcttagtgtatgcattggtcgtttccgttgtatctatattgataaacagatagttgataaatcgattttgagaatcatagagagcagtaaccttagtagtaagattaataatcccatttctccggctatctacatattgatttatttttgagaagtcataattgatggagaagtttacatcttctttcgctctcaatctctctttaacctctaaaggaatattgggattgtcgaacagattaactcccaatgcttcattcttgtcagacaagccgaatatttcaagctctttatcattaatatctaccagataaccgtctttgtcataaagttcgacgcctgccggaaggttcttatagatgtttctcaatatcttctcgctgttgtccaaagcaagacgatcttctttggcttgtaattccgactttcgcaattcgatgcaaatactgataatattagcaagagaggagaagcattgataatccacattgctccagctacgctgcgttcttaccatatcaattcccatatagccccatacctcttctttagagattagcggaactaccatcagcgatttgatatcctgcatttccaatgtctgacgatattccgcagcttcttcgggcatgtcgtccaacgtgttcagaatgatagctcttctttcggctatctgatggttccaccaggtagaagggtcccagggaatattgctcaagaattcctgttccttggatattccttcggcggtaacctcataagtgcaatcctggcgttgttcttttctgtttatttcgaagatatagatacgatcgcccaaaaactggttgaggagatctcctaatgtcttgttaaccacttgagtgacatcatcacattgcagaaaagcaagcaatgaatatgaaatattagtttgttggtaaagcagattgctcacttgaaagaaatcaatgttttcattcgtagtatcgatcggtctgtcaatatattgcagaaagcccgtcatattcctatatccctctttatcgggcttttggaaattaatcttagagtacacccatatttccccgtcttttgcccggattgggaacatttgttcgtatgtctccagataagaaagagacatatattcatttttaagacgcagccggtgatcttcacgtattctttggtgaaattcggtgaaactgatgcggttactttcaaggccgagtaagtcaacaataaagtcagagcagatatattctttatttttcaaatctgactcccaccatcccattttggccatttgtgctatctgaacgtatttttcatagtcataatttgtttgttctttcatattgtttgctcttgttttctgttttatattataagctagccggcaaagataagcataacttttaaataatgaggaatttgcatatcacagcaggatgaaagtggaaatttggtgctgaaaagtggaaaaagagacaaatgagtacaaacaggggattatttcgtctttctcttagtgaagaagtgaattatataatctataatatatatcagaagaatgaaaaataccagattattcatgtttgcggcatgcacactttttttggcagcgtgtggcaggcaaaccgtgaagattatgactccgccggatgcgtcaaatcgtgttctgtttggtgcggagcagttacagactaccttggataaagccggttatcaggtaatgatgcaacagggagacacgacattctccgatcccgaaatcaaaacgattctcttgacggaagtaaatgacacgacgctcaagaaagaaggttttcatatttcgacgacgggcaatctgaccagagtgtccggcagggatgggagtggtgtcatttacggatgccgtgaactgattgaccgtgtgaatgattcggatggtaagttgaacttcccggaggaactgaaagacggtcctgaaatggtattgcgtggtgcatgtgtaggattacagaagatgacctacctgccgggacatggtgtatacgaatatccgtatacgccggaaagtttcccctggttttatgataaagaacagtggattaaatacttggatatgctggttgccaaccgcatgaattcactgtacctttggaatggccatccgtttgcgtcattggtgaaactggaagattatccgtttgcactggaagtagatgaagaaactttcaaaatgaacgaagaaatgttctctttcctcacagaagaagcggacaaacgcggtatctttgtcatacagatgttttataatatcattctttccaaaccttttgctgaacattacggactgaaaacacaggaccgtaaccgtcccattactcctctgattgccgattatacacgcaagagtattgccgctttcattgaaaagtatcccaatgtaggattactggtttgtctgggtgaagcgatgtgtacagtggaggacgatgtggaatggtttaccaaaacaataattccgggagtgaaagacggattacaggcattgggacgtacggatgaaccgcctcttttgttgcgtgcgcacgacacggactgcaaactggtgatggatgctgctttgccgctctataagaatctttatacgatgcataagtacaatggtgaatcgttgactacctacgaacctcgtggcccctggtcgaaaattcatacggatttgagttcgttgggttccattcatatcagtaacgtacatatcctggcaaatttggaaccgtttcgctggggttctccagatttcgtacaaaaggcggtcactgccatgcacaatgtacacggtgccaatgcgttacacctttatccgcaggcttcatattgggattggccttatacggcggacaaattaccgaacaatgaacgcgaattccagttggatcgtgattggatctggtatcagacctggggacgctatgcgtggaactgccaccgcgaccgtacagatgaaatgggttactggaaccatcagttgggcaagttctacggaacctctgacgaaaacgcaagtaatatccgtgtagcatacgaagaaagcggggaaattgctccgaagttgttacgtcgtttcggtatcacagagggaaatcgccaaacgttattactgggtatgtttatgagtcagcttgtcaatccgtacaaatatacgatttatccgggattctatgaaagctgcggaccagaaggagagaagctgatagagtatgtagaaaaagaatggaaaaagcaacctcatgtaggtgaaatgcctttggatattgttgctcaagtaatagaacatggagataaagcagtagcggctattgataaagcagcaggttccgtctcttcaaataaggatgaatttgcacgtttgcagaatgatatgcattgttatcgtgaatttgcgtatgcgttcaacctgaaagtgaaagctgccaaactggtattggattatcaatggggaaaagagattaagaatcttgaagaagctattcctttgatggaacaaagcctagagcactatcgcaaattggtggaactgacggacgaacattacttgtatgccaacagtatgcagactgcccaacgtcgtattcctatcggtggagatgatggaaagaacaagacatggaaagaactgctggtacactatgagaaggaattggagaatttcaaagccaacctcgctttgttgaaagaaaaacagaatggaaacgcagtgactgaaactgtcgagattgctgcctggactcctgcaaacgtgaaactgatctctaattatccgacagtgaaagtagatgagggtatttctttatttgtggatgttccaggtaagatagaagcagtagctccggaattgaaaggaatgaaggcgctccgctttaatggaaatgagcagagagagaaaggcacaagcatcactttcgaaacggatgctccggtgaaattgttagtcgcttatttcaaagacgaccagaaaaagtatgcaaaagctccgaaactggaaatcgatgcgtcagccaatgattacggtcaggcggaacctgtattgacgaatgctgtccgtatcaatggaatgcctttggcaaatgtgcatgcatatagttttccggctggaaagcatacgttgatgttacccaaaggctatctgcaagtgttgggattcacggctgcagaaacgaaagtgcgtaatgctgggcttgccggggatgaagaaacgatggattggttgttttattaatgagaatttatatttcaccacagaggacacggaggacacagagttcttctctctcttttccgcaagtaaaacagagcgatacatacgattataaatacgtaagactctttgttactctatagtggataaaaataataaacctctgcgtcctccgtgtcctctgtggtgaaatattaagtattaaacgattagaaaaagtatcatgaagaagttattgctggcagtttttagtatagccaccactttctctctatatgcgcaacgggaagttccgcaagaacgaatggagcagatttacgaggaagtaaagacaccatacaagtacgggctcgcagttgccccggcagacaattatcataagattgattgtcctaccgtttttcgccagggagacaagtggctgatgacttatgtggtttacaacggtaaaggtggaaccgatggtcgtggttacgaaacgtggatagcagaaagtgataatttgctcgaatggcgcactttgggacgggttctttcttatcgggatggaaaatgggactgcaatcagcgtggcggatttcctgcattgccggatatggaatggggtggaagctatgagcttcagacttataaaggtcgccattggatgacttatatcggtggtgaaggaacgggctacgaagctgtaaaagctccgctttatgtcggactggcatggacgaaaggagatatttctacggcacatgaatgggaatctctggacaaaccaattttgagcatccatgataaagatgcccaatggtgggaaaaactgactcaatataagagtaccgtttattgggataaagataaaacattgggagctccgtttgtgatgtattacaacgcgggcgggcgtcatccggaaacggatttaaagggcgaacgtatcggcattgcgctttccaaagatatgaaaacatggaaacgctactccggaaatccggtctttgcgcatgaagcagatggaaccataacaggagatgcgcatatccaaaagatgggagatgtgtatgtgatgttttacttctctgcttttgaaccttcgcgtaaatataaagcattcaatacatttgccgccagctatgatttggtgaactggaccgactggaaaggggccgacctgattatcccctccaagaactacgatgaactgtttgctcataagagctatgtggtgaaacatgacggagtggtttatcatttctattgtgcggtaaacaacgcagagcaacgtggcattgccattgctaccagtaagccgatgggacgttcggctgtccgtttcccgaaaccggaaatcaagaaccgccggcagatcactacattgaatgagggttggaaaacctggattacagaggcaactcacttgaaaggtaattttatgatgcctgcaaaaatagtgaatattcctcataattgggacgattattatggataccgtcagttgacacatggaaacctgcatagaacagctatgtatgtgaaagatttcacggcagatgtaaaatccgggaaacggtatttccttcgttttgacggagtgggtacatacgccaccattacagtgaacggaaagaatttcggtcgccaccccatagggcgcaccacattgactttggatgtcacagatgaattaaaacagggagtaaatcgcttggaagtgaaagccgagcatcctgaaatgatcgccgatatgccttgggtatgcgggggatgttcatcggaatggggattcagtgaaggttcccagccgttaggtatcttccgtcctgtggtattggaagttacagatgagattcgcatagaacctttcggtgtacatatttggaatgacgaaaaagctgctaacgtatttgttgaaacagagataaaaaattatagtaaaacaacagaaacggtagagttagtcaataaactaagcaatgccgatggaaaacaagttttccgtttggttgagaaagttactttagctccgggagaaatgaaagtgattcgccagcaggctcctgttgagaatcctgtcttgtggaatacggaaaatccgtatctctataaattggctagcatgattaagcgtgatacgaagacgacggatgaaatttcgacacccttcggtattcgtaccattagctggccggtaaaacgaaacgatggagacggacgtttttacctgaatgggaagcccgtgtttatcaatggagtatgcgagtatgagcatcagttcggacaaagccatgcgttcagtaatgaacaggttgccgcaagggtaaaacagatacgtgcagccggtttcaatgcgttccgggatgctcatcagccccatcatctcgattatcagaagtactgggatgaagaggggatcttgttttggacacaattttccgcccacgtgtggtatgacactccggagtttcgtgagaactttaaaaagttgcttcgccaatgggtgaaagaacgtcgtaattctccgtcagtggtgatgtggggattgcagaatgaaagcactttgcctcgtgagtttgcacaagagtgcagtgaccttatccgggagatggacccgactgccaagacaatgcgtgtcataacaacctgtaatggtggcgagggtacagactggaatgtgattcaaaattggagtggtacgtatggaggagatgtgacgaaatacggccgtgaactctctcaagcgaatcaattattgaatggggaatatggagcgtggagaagcatcggtctgcatacggaaccaggggattttcaagtgaacggagtgtggagtgaagaccgcatgtgtcagttgatggaaactaaaattcgtttggcagaaaaggcaaaagatagtgtttgcggacaattccagtggatatacagcagtcatgataatcccggacgtcgtcagccagatgaagcgtatcgcaaaatagataaagtaggtccgttcaattataaaggattggttactccatgggaagaaccgttggatgtatattatatgtatcgtgccaactatgttccggctgcaaaagatccgatggtttacctggtatcacatacatgggccaaccgttttgaaaaaggacgtcgccgtgccactatcgaggcttacagcaattgtgattctgtattgctatataatgatctgacaaatgaaaaggcaaccttcctcggacgtaaaaagaacaacggaacaggcactcattttatgtgggaaaaccgggatattcgttataatgtgcttcgtgctgtaggatattataaaggtaaaccggtagcagaagacctgatcctattgaatggtctggagcaagcccctaacttcaaacttctttatcaggatgataaaaagatattgaaaggagaggcaggatataattatctgtatcgtctcaactgtggaggggatgattatacagatagcttcggacagctctggttgcaggacaatacgaattattcccgttcatgggcggagaatttcaaggatctgaatccttatcttgccagtcaacgtaccaccaatgatccgattcatggcactcgtgactggacgttattccaacatttccgcttcggacgtcaccaactggaatatcgtttccctgtggcagacggaacatatcgtattgaactgtatttcacagagccgtggcatggtacgggcggaagcgcttctaccgactgtgaaggactgcgcatattcgatgttgccgtgaatgattctgttgtattagatgatttggatatttgggctgaaagtggtcatgacggagtgtgtaaaaagatagtatataccacagtgaaaggtggaatgttgaaaattcatttcccggaagtgaaagcaggacaagccttgatttcaggcattgctattgccagcacagatcaggaactgaaaccgaagatattccctgcatccggttggagctgggaaaaggcggataaagaagtgatggaaaagactccgaaagagttgcttccggaagataaaaatgctcgtgtcagtatatcatacgaagcggaaatggctgtactgaaaggcaaattccaaaagaaagaacatcgaaaacagatcggagtgttttttggtaaaggaaaaggcaacagcattgaatggaatgtttctaccgggttggcacaagtgtacgcgcttcgctttaaatatatgaacactaccggaaagccaatacctgtcttgatgaaattcattgattcaaaaggagtggtattgaaagaggacatattgaacttcccggaaacaccggataaatggaagatgatgagcaccactaccggaacctttatcaatgccggacattacaaagtattactttcggcagaaaatatggacggtctggcattcgatgcattggatgttcaataagttttttagaaaaacacacatataaacagaaaaataaaagcgggacattaagaagtttgaatatacttccggtgtcctgcttttcatattttgatactttcttataaataaaatatagatgttatttttttaagattcgatgttctgattttaattattcgagggagaaacttcaaataatccctatatttgaaatcaaaaacaaaataacacaatggagagtgatttacctaattttgatttgccgtctgattatattgttggagaagggtatgggataaatttattaaaaaggtataaaaactttccttgcagggtaaaagccggttttttcattctttgtgtaaaagggataatgcaaacgacaatcaatgggaatcttcaaaatattggtgaaaatgatttgataaccttaccgcccggatattttatggaaattcttgatttttcaccggatattcatatctattatgccgggttctcatccgaattcatagagggtataaatctaatgaagtctacagaacatcttctccctataattatggaaaatccgataataagattatctccattgcaggcttgcagttataaaatgttctatgaatcgtcaattctttcgtatgcttctccaaaaacattggcaaacaaggaaatagtaaaggcggttcttaccatgttccttcagggagccactgaaatttataaaatgcaaaataacttgtatttatcttcccagtcaagaaagtacgagatttatcaggattttttgcaattggtcatgaaatattatactagtcatcacggaacctctttttatgccgaacatctagggcttagtttgccgcatttctgttcaacaataaaaaaggttgcaggcaacactcctttggaagtcatagcttccattattctgatggatgccaaatcccggttgaagtcaaccaatgagccggtgaagaatattgccttatctttgggatttaataatatctctttcttcaataagttttttaagcaacatacgggtgttaccccacaggaatacagggggcattaaacttccaccagctgtttctcgagtggtaatgtaacggtaaaacggctgcctcttcctacttccgatacaacagaaatactcccttgcagatgttctacaatcgttttgcagatagagagtcccaaccccgtaccctgcttgaaagtattgactttatagaaacggtcgaatatttctttctggcattcttggggaataccttcccccgtgtcctccacaaacagacaaactgaatcgtcattttccggattaaccataaaaccaaaatgaatatatccttcttctgtaaatttccgggcattatttatgaaattgcatattacttgtttcaagcgtgtagcgtcagtagttatgtaaatatcatcatccggcaagattgcttttatttcgatttccggcacatttttcacgacctgctctttctctatatccttcattatggatttgagggagtaattggaataagtaaacttgatagtgtttgattcaatcttggacaaatcaagtatatcgtcaatcaatcgtactaaatgttcgctattgatgctgattagtcgcacgaaatcggcacgttcctcttcacttaactcatcataagtagaacctataacatcagaaaagccgactattgcattcagcggcgtacggatttcatgactcatgttggctaaaaatgccattttaagacgatcgctttcttctgcttttttacgtgcctcgattaaggtgttttctatgtctttatattcctgaatactcaagcagattcccactaaccgatagggatgaccggatatgtttgcaatataagtagactgcccttcaaaccattcccaagtaccatccccccggcgcaaacggaatggaactgttttgtcaaaagttgtattaccactaagttgtacaacaaaggcgtcagccatagtttgccgatcgtccggatgaatcatattcacatattcctccattgtcaaagtattattctctccggctggaatacctaaatgttcaaaataacgatcatcaagagtaaattcactacggcttatgtcataataccaggggtatatcctagttctttgcaaggctgtatttaatatatattcttgtgtcagttccactgtaatattacggaaaaagaacaagatgattttttcgccctcttcattttccattgtagcaaattctcctcttatcgggaattgtgtatagtcaacttgttcctgcataaatgtatgttcaggcagtgagtatacttttttgccctgatgaatttcttccaaaatggtcgagagtatatcttctttcttatttaacagcttgaatatcttgttggtcggaagaggcatcatcgcattgactgacgaatgtacatggagttccgtaagagcttgctgattcagttgtatgacttctctatttatatccaatatgataactccgtcaggcagaatattcagcaaatcatcattgtagagtgtttgtccgttcgcttccatattttgttatttttcgttcaatgtacaagataataattaaattcataacaaagaaagccattttactgaagaaaacattatttcaacaaaccttttgtacctgtttatacagctattttaatttgcaacacattgaatgttaatacgatattccttttttaagattcgatactcatttattaagccttattccgtttatttgccagtcatttttttctgttccttcagtgaaattgaatgattgcacagaagaagacaacggttcgaatgtgagtgaaaattctgcttcgccgctttcaggcaaataaaagtgctcaccggggttaatcccatctgctttctttaaggtatacgttttacctttctcatctaccaatctacaattcgggctgactcgtatccagtatttgggtatgtaatatgcatagaaatgaacgatagtggctgtgtcagtcaattctacctgcttcacttcaagaatatcggtattggttgattcaaaacttggatggttaacgacttttctattggtgtccccggtgatactcatctcacgctttggcgcatccaaatatctacgcatctttaatttcaggctgcctttaccatagcccgaccacattttcatgattttgccttcgggagagataagaacataattgggaatacctcgaactccatatttagcgtataatccggctgtttgttttaagtcatttaaattctgccaggtcatttcatgttttgccgaagctgccttccacctgcttttcgtatcggagcttagactaatgatagtaagacgctctttatattgttcttgaatctctttcatctctggtaaagccataatgcaaggaccgcaaccgctactccagaaatcaagcaatatatattttccattgaaatcagtcagatgatgaatctttccatccaaatcgaaaagttcggtatctgccattttatctccctctttcacaactgtaggcgggaaaagattaactgtaatttcctgtcctgttatagaagttttttgtgcttcattcattctattatacaaagccagtgtttcatctttataagagaaatttggattgtacttcaccgacatgctcaatttatatagcctgtccatccaaatgtttgatacaggaagttcctgcatcagtttcatttcacgtttgctgattaaagctgaaatactgtcttctttcgcacgtagagccttccgttcggcttccggggcagaacgcagacttcttgctttgatagacaaacgttgatactcatcccataaatcgtgtgaatcttcaataaacctattatattctatttgttcctttacagggctgtctactgtccacgtatgtatcaaggtattcgttccggttactttgattcttgcattaggagttgcataaatctccagcgacatggaaggaaaatcatcattacgggtacacattagagataatttgtctaaaccatcttctccggcatttcgtttgaagaagaaagtaccgttttgtatggtatccatggctactgtacttcctacatttccgtcaagtagaaaaagagaaacaagagttccatcctttacaccttccactttaccttcaatcgtatactcgtgttgtgcttgtgaaacgagactgcctaataaaaagaggctgctaaatagtagttttttcatcatcataatattagaagtaattatacgccacaaggtaaagcttttctttatagagtgttactccttttattgttctttaatatttctgtaaaagaaaggggtacaaaatgccctttcgttcgtctacttgatatgaagaaaaaagaacgaatgaaaatatatactttactgcttggcgcattgtttgtaagtcctacacaggcacaaacaatgcatgattgggagaatcatcatgttctccagatcaaccgtgaaccggcaagagctacttttacccctttctctgtacagaaaggagacggctcaatctctttagacggaacctggaaattccgttggactcccgttcccaatgaaagagtcgtgaacttttatcagataaattttgatgataaagattggacggattttcctgttcccgccaactgggaagtgaacggatatggcacgcctatctatgtttcagcaggctatccgtttaaaatagatcctccacgggtgatgggagaaccgagaactgactataccacgtataaagaaagaaacccggtagggcaatatcgccgcacttttgtattgccgaccggatgggaagtgaatggacagacttttctacggtttgagggcgtaatgagcgccttttatgtttggatcaacggtgagcgggtagggtatagccaaggcagtatggaaccgagcgaatttaatgtcacgaagtatctgaaatccggagaaaatcagatttcactggaagtctaccgatatagtgacggttcttatctggaagatcaggatttctggcgttttggtggtattcatcgtagtattcatctgatacatacgccggatattcatgtccgtgattatgcggtacgtactcttcccgcatctgctggtaattataaagactttattttgcagattgatccgcaatttagtgtatatcgagggatgaccggaaaagggtatattttacagggagtactgaaggatgcttcaggcaaagaagttgccacattgaaaggcgatgtggaagatatgcttgatttggagcataaagcaagccggatgaatgaatggtatccgcagcgtggcccgcgtaagatgggacgtttgtcagctattataaaatcaccggaaagatggacggcagaaacgccctatctctataaattacacttaactctccaaaatgaagaaagaagagtcgtagaacagatagaacaggccgtgggcttccgctctgtagaaatcaaaaaaggacaactgttagtgaatggtaatccggttcgttttcgtggagtgaaccgtcacgaacatgatccacggacggcacgtgtcatgagcgaggaacgaatgttgcaggatattcttttaatgaagcaggcgaatataaatgccgtacgcaccagccattaccccaatgtcagtcgttggtacgagctatgcgacagcttgggattgtacgtgatggacgaagcggatatagaagaacacggattgcgtggcacgctcgcaagtacccccgactggcatgcagcatttatggaccgtgcggtccgtatggcggaacgtgataagaattatccatgtattgtaatgtggagcatgggaaacgaaagcggttacggaccgaacttcgctgctatttcggcatggctgcatgatttcgatcccactcgtcctgtacactatgagggggcgcagggagtggacggaaatcctgacccgaagacggtcgatgttatcagccgcttttatacccgggtgaaacaagaatatttaaatcccggtattgcagaaggagaggataaagaacgcgctgaaaatgcacgttgggaacggttgctggagattgcggagcgtaccaatgacgaccgtccggtgatgacgagtgaatatgcacattccatggggaatgcattaggaaatttcaaggaatattgggatgagatatatagtaatccccgtatgctgggtggttttatatgggattgggtagatcagggaatctacaagactttacccgacggtcgtaccatggtggcttatggtggtgactttggcgataagccgaatttaaaagctttctgctttaatggattgctgatgagtgaccgtgaaactacgcctaaatattgggaggtaaagaaggtatatgcaccagttgaactgaaaatggaaaatgggaagctgaaagtgacgaaccggaaccatcatatcgatttatcatcttatcgctgcttatggacattgtctgtggatggaaaacagaaagaacaaggagaaattacattgccggaaatagctccaggagaaagtggaacaatagatttgccgactttccgttcattgaatcctctttccgattgccaactgaaagtaagcattgttttgaaatcggatgctctttgggcaaaggcaggacatgaagtggcctgggaacaattctgtttgcaaaaaggagatttagcttctgctgatttaattaataaaggaacgcttcaagtggaagaggatgataaatctttattgattagcggacgtggtttttctgttcagtgggaaaagaaagtgaacggaagtatgacctcccttatatataagaacaaagaaatgctggctcactccgatgattttccggttcagcctgtcactcaagttttccgtgctccgacagataatgacaagagcttcggaaactggttggctaaagactggaaattgcatggaatggatcatccgcagataaatctggaatctttccaccatgaaaaacgtgcagacggggcggccattgtccggattcaaactagtaatttatataaagaaggaaaagtggtgactacttctgtctatacagtcttttcagatggaacgattgatctgaaaacaactttcttgccacaaggagctcttcctgaaattccccgtttaggtatcgcattctgtctggcgcctgcttatgatacatttacctggtatggcagaggaccgcaggataactatcctgaccgcaaaacatctgctatgatagggctttggaaaggaagcgttgcagaacagtacgtacattatccacgtccgcaggatagtgggaacaaagaggaagtgcattatctgaccctgaccgacaaacagaataaaggtattcgtgttgacgcggtagaaaacgtattttctgcatctgccctgcattacaccgtacaggacatctatgaagaaactcacgattgtaatttaaaaccacgtgcggaaatcattcttagtatggatgctgccgtacttggattaggaaacagtagttgcggaccgggtgtattgaagaaatatgccatagagaaaaaagaacatacgctgcatatccgcatcagtagtaaacaatgatagcaataaataactaacacaattataaaagtaacaatgaaaaaagtaaccactttattatcgaccttagcgttggcaactaccctggctgctcaaaaccttccacaaacggaaaggcaatatctctccggtcacggatgcgacgatatggttgaatgggacttcttttgtaccaacggacgcaattccggcaaatggacgaaaatcggtgtaccttcctgttgggaattgcaaggcttcggcacttatcagtatgggatcactttctatggtaaaccatttcctgaaggcgttgccaatgaaaaaggtatgtataagtacgagtttgaagttccggaaaagtttcgcggcaaacaggtcagtcttgtatttgaagcttcaatgacagatacggaagtaaaagtgaacggacgcaaagttggttccaaacatcagggagccttctatcgtttttcatacaacgtcacggatttcctgaaatatggcaaaaagaatttactggaagtcactgttgccaaagagagtgaaaatgccagtgtgaaccttgccgaacgtcgtgctgattattggaatttcggcggtatcttccgtccggtgttcttggaggtgaaaccagccgtaaacctgcggcacattgccattgacgcaaagatggatggaactttccgtgccaactgctacacaaatatctctaatgacggaatgagcatccgtacacagattttagataaaaaagggaaaaagataacggaaaccaccgtacccgtaaaagctggaggcgactggacttccctgcaactgaatgtatctaatcccgcattatggacagcggaaactccgaatctttataaagcgcaattctctctattggataaggctggtaaggttttgcatagtgaaacagaaaattttggtttccgcacgattgaagtacgcgaaagcgacggactttatataaacggagtacgtatcaatgtacgtggtgtcaatcgtcatagtttccgtcctgaaagcggccgtacattaagtaaagcgaagaatatcgaagacgttcttttgatgaaaagcatgaatatgaattctgtccgtttgagccattatccggctgacccggaatttttggaagcctgtgattctctcggactttatgtgatggacgaattgggaggctggcatggcaagtatgatacccccaccggagtacgtctgattgaaggcatgatagaacgtgacgtgaatcatccgtctattatttggtggagtaatggtaatgaaaaaggatggaataccgaattggatggagagtttcataaatacgatccccagaaacgtccggttattcacccgcaaggtaatttctccggttttgaaactatgcattaccgttcttacggagaaagccagaactacatgcgcttaccggaaatctttatgcctacggaattcttgcatggtttgtacgatggcggccatggtgccggattatacgattattgggaaatgatgcgcaagcatccccgttgtatcggtggcttcctttgggtattggcagacgaaggtgtgaagcgtgtagatatggacggattcattgataaccagggaaactttggagcagacggtattgtagggccacatcacgaaaaggagggtagctactacactatcaagcagttatggagtccggtacaaatcatgaatacttctatcgacaagcaatttgatggcaaattctccgtagaaaaccgttacgattatctgaatctgaatacttgccgtttcctttggaagcaagtaaaattcccgctggcaacagatgcgtccaatgccgctattcaagtgttgaaagagggtgaagtgcaaggcagtgacgtggttgctcactcggcaggcattttggatataaaaacaaatatcctccccaatgcagacgccctctttctgatagcaatcgacccatacggccatgaactttggcgctggactttcccggtcaacaaactgaatcagcagacagaacagctttctcccttgtccagtcgtcctgcttatacagagacagaaaatgagcttactgtgaaagcgaataagcgtacgttcatcttctcaaagaaagacggacaactaaaaggagtatctgtagataaccgtaagattagtttcgccaatggcccccgtttcattggagcccgtcgtgcagaccgctcattggatcagttctataaccatgatgatgagaaagcaaaagaaaaagaccgtacatatagcgaattccctgatgctgccgtatttacgaaactggacgtaaaacaagatggaggtgatctgattgttaccgccaattataaactgggtaatttggataaagctcaatggacaatcaacccgagtggggatttggctttggactacacctacaatttctccggtgttgtagatttgatgggtattcgtttcgactatcctgaagatcaggtaatcagcaaacgctggctgggtgccggaccttaccgtgtatggcaaaaccgtattcacggaacgcaatacgatgtatgggaaaacgactataacgatcctatcccgggtgagactttcacatatcccgaattcaaaggatactttggtgatgtttcctggatgaatatccaaacgaaagaaggcactatcagcctgacaaacgaaactcccgacgcatatatcggagtatatcagcctcgtgatggccgcgaccgtttgctttatactcttcccgaaagcggaatctctgtcctgaacgtgattcctccggtacgtaataaagtaaactccaccgatttgtgtggtccctcttcacaaccgaaatgggtaaatggtccacaaaccggacgagtcattttccggtttatgtaaatgaatcatataaaggtatccacattgcgttggataccttttttatttggccttctcaccgatttttcaaggaaaaaggctataagtggggaataatcattatttttgtttcgttttatacattcagattaatgaattctttcctatgtacacaatactaattatagaagatgaaccccgggttgcaagtttgctgatgaacggactggaggaaaatggctatcagacaatggtggcttatgacggactgatgggattacggctttttcaaacgcatacatttgatctggttatatccgacatcgttctgcctaagatggacggatttgaactggcgaaagaaattcgcaaaaccaatcccaatattcctatattgatgttgacggcattaggatcgacgaatgataaactggacggcttcgatgccggtgcagacgattacatggtgaaaccttttgatttcagagagttaaatgccagaatcaaagtgctgttgaaacgtgtgacaggtaatgcgcaggaattaccgcaggaacttgtctatgcagatttgcgtattgatcttcaacgaaaagatgtagaacggaatggtatatccattaaactttctcctaaagaatacaacctgttgttatatatggtagaaaatgccgaaagagtattgagcagggttgaaatagcggagaaagtatggaacacccattttgatacaggaacgaatttcatagatgtatatatcaactatcttcgcaaaaagatagaccgggattttgaaccgaaacttattcataccaaagccggaatgggtttcatactgactgataaaatatgaagatcaggacaacgttgactctacaatatgcagggcttacagctgcggtattcttcgtatttgtgatggctgtctactatgtaagtgaacattcgcgtagcaatgctttctttcgtaatcttcaaagtgaagctataaccaaagcacatttattccttaaggatcaagtagatgccaaaaccatgcagtctatttacctgaataatcagaagtttattaatgaagtagaggttgctgtctatacaacagattttaaaatattatatcacgatgctctgcaaaacgatattgttaaagaaacgccggagatgataaaacgtatcctgaagcgaaagaatatcaatttctatgtggacgaatatcaggctataggactggtgtatccgtttgagggcaaagactatgtggttaccgccgcagcctacgacggttacggatacgccaaccgagatgcgctaagaaatatgcttattctcctatttatcggtggattgagcgtattagtggttgtggggtatatcctttctcgaagcactttaaaaccgatacgtaatatagtgaaagaagcggagaaaatcacagcatcgcatattgataaaagattacccgtaaaaaatgaacaggatgaactgggagaattgagtacgacattcaatgcattgttggaacgcctggaaaagtctttcaattcacaaaagatgttcgtcagtaatgtatctcatgaattgcgtacccccatggcagctcttacagccgaattggatttagctttattgaaagaacggagctccgaacaatatcagatggctatcggcaatgcactgcaagattcgcgtcggattgttaatctgatcgacggattattgaatctggcaaaagctgactatcagtcggaacagataactatggaagaagtccgtctggacgaactgttgctggacgccagagagctggtactaaaagctcatccggattatcacatcgaattagtatttgagcaggaagccgaagaagataatgtgctgacaataatcggaaacagctatttactgaccaccgcttttgtgaatctgatagaaaataactgcaagtactcttccaaccgggcttcatcagtcctgatcgcctattgggagcaatgggcaatcattcgtttgtctgataacggtgtaggtatgtctgatacggataaagaaaacctgtttaaactgttttatcgtggagagaacaaacatattgctcctggaaatggtataggcatggccttgacacagaagattatccaccttcacaaaggcgaactgaccgtatcttcccataaggatgagggcactacttttgtggtgaaacttccgcatatttaagaaattctaatagctttctaataccactctaatcattctctaacagcttcccggtgaagtcttccttacttttgcatcgaattaacaaatgcagttagtaacttaaaaaaaattagagagtatggtatggaagaaaaaactgcgttcatcacagtacatattcaattcagagaaagtatttttggttgccacacaacccggtaagtcaatctattcatacttacagacaacaaagcttggattaacgttgggagaagtgcaggagcgacaatccgtttatggaagaaacaaagtggtgcatgaacagaaaaagaatccgtttatcctgtttatcaaaacgtttatcaatcctttcattggcgttctgaccgggctcgccattatatccttatttttggatgtattgatggccgatcccggagagcaggaatggacgggagtcatcatcatctcatccatggtgctgttcagtgctatcctgcgtttttggcaggaatggcgagcaagtgaggctacggattctttaatgaaaatggtaaaaaacacatgtcttgccaaacgtgcgggagagcatgaagaagagatcgaaattacggaactcgttccgggagatatcgtgtatttggcagccggggacatggttcctgctgatattcggatcatcgattcgaaagacctgttcatcagtcaggcttcattgacaggagagtccgaaccgatagaaaagtttccggaggtacggggacaacagtttcggaaaggaagtgtcatcgaattggacaatatttgctatatgggttccaatgtgataagtggtgcggcaaaaggaatcgtttttgaaacggggaacaaaacctatctgggtactattgcaaagagcctggtcgggcatcgtgccactacagcttttgacaaaggcattagcaaggttagcttcttattgattcgtttcatgctggttatggttccatttgtgtttttcgtaaatggctttacgaaaggggattggtttgaagctttcatattcgccatatccgttgcggttggccttactccagaaatgttaccgatgattgtgactgccaacctttctaaaggagcgatagccatgtctaaaaagaaaacaatcgtaaagaatctcaatgccattcagaattttggagcgatggacatactctgcactgacaaaaccggtacattgacctgcgataaaatcgtattggagaaatatatcaatgcagatggcagtgacgataacagtaaacgtattcttcgtcatgcttactttaacagttatttccaaaccggtttaaggaacctgatggataaagcgattctttctcatgtaagagatttgagtctggaacatttgaaggatgactacactaaagtggacgaaatacctttcgactttacgcgcagaagaatgtctgttgtaatagaagacaggcagggaaagcggcaaatcatcaccaaaggagcagtagaagaggttctcgatgtctgttcctatgccgagttcaacgggcagattcatcccttgactgatgccttgaaaatcaaagcacagatgattagtgaagaaatgaatcagcagggaatgagagtattggcagtttcccagaaaagttttatcgagaaagattgtaattttgccattgaagatgaaaaagaaatggtactgatcgggtatcttgcttttcttgatcctccgaaaccttctgctgccgaagccattgaacagttatatgcgcatggagtagcagtgaaaattctatcgggagataatgatgtcgtagtgaaagcgattgcccgacaggtaggaattgataccagtcattttcttactgggatagaaatagagaatatggacgaaacaacattgaaagaagcggtaaaggataccactttattctcaaaactgactccattacaaaagacgcaaatcatctctctgttgcaggagcaaggcaatacggtaggattcttgggagatggaatcaatgatgcaggtgcattgcgtcagtcggacattggtatatcagtcgattctgctgtggatatagccaaagaaagcgcagatattatcttgttggaaaaagatttgatggtattggaagacggagtgctcgaaggaagaaagacattcggcaatatcaataagtacataaagatgactgccagttccaattttgggaatatgttcagtgtgatgtttgccagtgcattcctgccgtttctgcccatgatgccgatacatctattgatccagaacctgttgtatgacatatcgcagaccaccattccttttgaccgtatggacccggagttcctaaagaaaccccgtaaatgggatgcgtccgatctaagtcgttttatgatttatgtaggtcccatcagttctatctttgatattatcacgtatctggtcatgtggtacgtatttagctgcaacagccccgaacatcagacactgtttcagaccggatggtttgtggaaggtttgttatcacagacattgattgtccacatgatacgtacccgcaagataccgttcatacaaagccgtgccacatggcctgtgatgggactgaccttcttaatcatggcaataggtattcttattcctttcaccactttcgggcgttccatcggattgacagctcttcctttgagctatttcccctggctggttgggattttgctctcttattgcattttgacgcagatcgtgaagaattggtatattaagaagtttgtgcgctggttataatccacagtatcatattttattcagaaatcattaagcgataaatatctaatattttcttatatagaatattctaacctacaaaaaagacaaggttgatattaaccttgtcttttttgtagctctctcattaattcatctacaatatatgcatcgctcatgagatatagatctccaagtcggtggacaatgcgctggtagctttcgctattataaaatatatcaagtgcctgtagactggaaatatgcagacgggtagcaagaagttctacaatgctgtaatatttgccttgcattacaatatcagcattggggatttcttttgagagagatgggaaaggcaaaagtatagcatccacaaaatgtaagtgttcatcaattactttttggttcgtaatacaaatttgattgttaggctcttgatgaatcaaacgtgacaacgcttcttcacgagtgtaatcaccacgcatataaaggtcaatagtacgtatcacacggtcatctgctataccgccttctattatgtcataatcctgccatataacattcccttgtcgacatgctacaacaaaatccagccaatgtgcatcgtaagtggtaaagtgcaaataatgaaaagaagagttacggcaggcatctatatccaatgaataaatattgagccatacacttttttcatggcgaatatcagctgtgcgaagagcccaacgaatagcctgatcctttaaatcagtaagataaaagcccactccgaaatcaagatttggtcggcatactccagctaatggttgttctacacggtaagtagaaccatgataaacagttaacatgacttatctcctttttgctgtgtcgaaacttgaaaaggacgataatctttcggtaaccattgtggatcacgatgatagatatattctaataaagaatctactatgtaggctttgccttgggtatgcaaagtatcataaaaagcatttatatagccgtctatagcacctaattcttttagtttattatatacatccgcactatagcgtcctaaccgttcagctgtattctctatacaatagataataaactctaattgtttttctttgagggtcatattattttctcctttcttatcttaatccattagcgaaaaagattaatattagcaaagatagaaaagttccttctttcttccaattaattagtatagtatatcacgtttccttatggaatattaaatcaaaatcaatatactttcattatagttttatagctttttcttctttcaccaatttcctccatctttgaaatgccctcatcagcgtttcttcctgtaccagtcctaccatttcgtagtgctctacgaattgttctattgactttttaaacatcactcctttattaaacttattatccaatagaaaagagtataattccgctttcatctccgtttctatttccttttctataatcaatgcactatcgtttccgatatagttatagacttccggattcttcccattacgcggtttgggcagtacaaagcaaatatttccaatttctttccatgaagtattttgcggatgagggacagatagttgatgaaggaagtgataaactggagtaatgtgggagagatggatagggataagtcgtttggcagaagaaggagaggaggaatgagactggttctctggatcgggttctaaactttgtcgatatcggacatacatatatccagccaaatatggcttgatattaattgtaactgtaaccatgggattttttttaaagtttgtaataaaaaagtatgtatatacagccccttggactgtgaattccgtttggtttattgagaatattcccatggttatcgggacggaattcttctttttataataaattgatatacagtgtattatagatactgttttttggtttaaaaccaaggagccgttccttttaaaggaacgacctgtttctcaccgaggaacgccttgttccttttaaagaaacggatggtcccttaaaatccgggaacaaaactagctgtaatattctgatctttcaaaacgcatagttgaaataccacaagtaatatgtaaatataaataatcattcttatacatcgtttgttttgcgcgtgtataaacgttcagtatgtcacaaaagataattgaataagttggataataatttaacaatgtttatccgataagtcctttttatagttatctaaccctcatttaagtgatttatagaactattttgaacgaaacttcggaatccatgtgcaatttcagaacgttttactttaatatatatttattttgtaatttcgcattcgataatcatttattaacgcaagcaaaagcaaaatattcaatatacgcatctgatgaaaatacaatatatagcaattctacttttgatatgttggggaagcattttaaaatgttcggcccaaaaggtagcagtaaaaacaaacctgttctacggtgcatattcaggtactcctaacttgggagtagagtggggactttctccacgcactacaatagaacttggcgccggacttaactggtttacacccaataaagcatcttcaaataaaaaactggtgcactggctcggtacaatggaatatcgttattggacatgtgaaagatttagcggacatttttgggggatacacataataggaacacaatataacatagccggtcatcacttgccacttttattcggggataattccagccattaccgatatgaaggatggggagcaggaggaggcatctcgtatggttatcacttccttcttagtaatcgttggagccttgaagcaaatataggtgcaggatatgtgcggctacattatgacaagttccggtgtaagacttgtggtgaaaaggtcggaacagaaaaccgcaattattttggaccaactaaagctgcaatctcacttatatttcttataaaataatacaaccatgacaaaattaagatcattcctatacctgttaatcatattcctgaccatttcttctttatcatacggagaagaaaatcccaagaaatggtatacaggaattatacagccaacagctcttgaactacagcaagcgggagattcattacatattcaaatactttacaactttgataatatacaagtcagctccaatcattctatagaactgataccagtattgattgctgcaaaccatcagatggaattgccggaaatatccattaaaggtcgtaagaactatcagaatctgaaacgtaaacttgctttgatgaatacgcaggaacatgctttttaccagtcagaagctccatactccatattaaaagggtatggaatgactggaaaagaacagattcggtactcgttgacaattccattcgagccatggatgaaggatgcatatctgaatgtaaagaaagaagtgatgggctgttgcaggccaggcaggttactatcagctattcctctttttagtgctgttactttggagaaacttcccgtcccttatcaaatcactccacatattagttacgtacagccaaaagttgaaccagtcaaaagtcgtgagatgtcatgtgaagcatttctggactttgtcgtatcaaaaaccgacattaaaccggactatatgaataatccgattgaactaaaaaagatatcctccatgcttgccgaagtgaaaaatgatacagccattaccattcgtggaatatcagtcattggttatgcttcaccggagggttctgtcctttttaacaaacagctttccgaaggacgtgcaaaggcacttgttaattaccttctccctcgtttccctttctctaaagaattatacaaggtggaatatggtggcgaaaactgggaaggactacgtaaaatggttgcaaggtctgacatggcagaaaaggatggaattcttcatattatagatcacataccagttgaaataaactaccgaacgaataccagtcgcaagaaatcgttgatgttatataaacatggcaatccttatcggtttatgttgcgtgagtattacccacatctgcgtaaagcaatctgtaaaatagagtacgatgttcagaattttaatatagaacaagcaaaagtgctgattcatagtcggccacaaaatttgagtctgaatgaaatttatttggttgctctaacttacaaaaatggttcaccagagtttatcgaattatttgaaacagccgttagcgtctttcctgatgataagattgccaatctgaatgccgcttcggctgcactttcacgtaaagacactcttttggcagaaaaatacttaaagagagcagagacttccacaccggaatacgaaaatgccgtgggagtattacatctgctaagaggtgactatgaacaagcaaagttacatctaaataaggctgctgaatccggattgaaacaagcaaatctcaatctggaggaattagccaaaaaagaagagaatatcgaattgatgagtaaactagattattgattttttatatattataattatctttttatttacaacatttaaacatttaacaatgatgaaaacaagaagttttctattatctacattggcagtttttatatttgccggctgtagtagtgaagatgcccgggaagggaatattccgggtggtgaactggatggcaaagcgtatctgtcgctttcgctgcaaagtcacacagctacttcaagagcagtgaatgtagaagaaaaaccgggaagttctggggaaagtaaagcaggggccgtcaaagttttattatttgacgaggatgatgtgtgccttgatgtggctgattttgatggtttgaccgttgggaatagcggaggagaatccggtggaacagggaccccggaagctgtagctagcgatgcaaaattagtaccagagaaaacaaaaaaagtatttgtggttatcaatccttacaccgacgggagcaaagggtggaatttaactacggatgctgtaaaaggtaaaccttggtctgcaattaacactgctattgaagcagttattgccaacatcgctaccaatgataatttcatgatggcgagtgcaggcgaaggagctggcatagaaggagcattgatgggagtaacggtgcataagccggatggatatacccaagacaaaatagatgcggcaaaaaaagaagcaaaagaccatcctgcagaaatctctgtggatcgattgagtgcaaaagtagaacttgcggttaaggatcctttttctacaaaacctgacggtgccaaatttacttttggcggttgggaattaagcgttaccaataaaagtgtgaaactgtatagcgaacttatcacttacgataatgccacgcctggagcggtttatcgtcgggataagaactatttaaagagcgaacaacctgatattagtgataatagtactatggaaactaatatggatgcagctttcaattatctaaaaaatatagatagcgaaagtgaggagatgcctgctgttgcacagagtaagggaacaagtctgtattgtcttgaaaatacaatggaagctaaggcacaacaattaggattcactaccaaggtggtagtaaaggcacagtacactcctaatagtttgactgaaaatagtagctatttttcttggaaaggaaactattatacattagaacagcttaaaactgaatataaaaacactcctagtggcggactaaaaacagacttacctatattcttaaagaaagcaaagctcgtggctggagatgccgatcaaagcactatagacaattttattacaaaccttcaagcgaacggacttactgcgaaaactggtatcatcggacgtttttgtgccgtgcgttactatcatgaatctgtttgctattacgatgtcctgatccgtcacgatcagaatgtaaccgaaaagatggctttaggccgatacggagtagtgcgtaacaactggtatcaccttgaacttcaaagcgtgagcggccccggaacaccgtggattcccgatccgtctgatcctgacaatcctacacctccgggtaccgatgatgatgaagcagatgcatatatttctgtaaaaatcactatcaatccatggacttattggacacaaggtgttgatttgcattgataaatgggaattaaaagacacataaagaaatacaaaataatccttgccgcttttatagtggcagggattaccggttgcgatgtccttcatgacgaccttgatcaatgtgacctctttctaaaattccgatatgactataatatggcaaatgaagattggttcgccgaacaggtggaagaagtaaaggttttcgtgttcgatacgcaaggaaaatatatacagacacttactgataatggccattcgctaaaaagtccggactatcgtatgctgataccctatcgtttgaaaggctgtacagctgttgtatgggctggaaaaacggataaattctatcagcttccgacaatggatacaggtgatccaataaataaattaacgctgaaatatgagccggaaaacaacataagtaacaaccatcttgatgcattatggcatagcggtcctctattaatgttttcttcggaaaatatcagtaatacagaaaatgtcagcttggtgcgcaatactaatgatataacgataggcattacgcgaggaaataatccggtggatgcttcaaaatatgacatacaactaataactgcaaacaatttttatgactataaaaataatgtaggtgagagcagcaagaatataatttaccatccttgttcagttgaagaggaagacagtaagaccgccctacaaacccgcctccatactcttagatttattaaggatgctgatacgactttttctatcaccgaaaaagcgtcaggaaaaacaatagacatcggaggaaaaacaactataaaccttattgactacctgttgatgagcaaaccgaaaatgatgggcgatcaagaatacctcgaccgcagatacgaatgggatatcaacattcgaatcggagataaggaagagaatggctacattgcattaagtataaccatcaataattggacctactggttccaaccaacagatatgtaaatcgttttttgaaacggaattatggcacgattaaggatgaatataactatcaacataaaattttcggcaaatatcctgcttttgacaatgtttgccctgtttacttactcttgtacaaaagagaacgaagtaacaggcgcacgtatttacgaaggagaaaagataccgatgagtattaaaatgggaacgcgcaatgctaccaccgacaaagatgaagtcataaattccgtacgtgcaattgtgtttaatgacaagaacgagctggtatacaacgacgtttctgatgcttccataaatgtcgatagcacatacaccgcttctataagagcggcacggggatataacaacatttatatcatctgcaatgaaacatcggagcttgccgaaaagctcgctgctattacactggaaaatgaaatagaaaaagtgacattctctgccgtaggtatcgttgctcctccgcccatgtatggaaatgtggcacgtgcctatgtggaatcccgcagtgacggaaaaaacgccacagtaacaattaataatattaaaatgacggaattgcctgttagcgtaacccgcatggtatcccgcatcagctttacagctattaaaaatataactaatccgaatgaggatttcaaagtaaccaagctcactgttaaagtatgtcgtatgccggccgccactcctatagaagaagggcgggcatatacggaagatatttggtcggatgaccttacgatatcaggaacaggcgagcttgacaaaaatggcgattatattataaaagataataactatactattcctgacacagtggattttataacaattcctgccacatatattcctgaacacttgctatcccaacctgaaaatgcttctcaggcaacctaccttaagattgacgcgcagtgcgtacttaaaaacggaagttctcaggtgctgaactgcgtttacctcttgaatatcggtcaagagcctcccaaaaactataatctgacacgaaacaaccattatcagatatacgccaccattaccggtatgggtgcaatggggttatatgcggaaatagtggcaatggaggaacatgatatcaccatcaactggaaacctatcgacggactggtcatagtgagtgacaaggcagcagattatgacgcggttgccgatacatccagaaatgtgaatatctggaatgatgtcagcgtttattcaggtatactgaaagcatatcattcggagacgggatataaggatgtattgttcaaatatggcagcctgatagccgtgcacagcggcacaagtgcgggtgagggttttatagctcctaccaatgccagtgcattgaacgatgtactctggtatcccggttcatacgatcccttaagcatcagcgggtggacagatattccctacctaaacacagacggaattcctgcaaataacaccgtagaccaagttaaagccggggtgggagatccctgcaagttggccggactttccgaaacccagatcaaggctcaaaacattgtggataacgggcagtggcacatggctactccgaatgaaaaccaagccctgatagcggcatcggataacgagaataattcatacggttatccttctttccattggctgctttccccgcataaccggtatagagacgcgggcggtgtatctcagggggaccgttccaatggatggtattggaacgacgacgcttcggtattcgaattctccggtaattcatcgggtgcaagtttccaaagtggcaaggacaggcaaagtgcctatatgattcgctgcgtgcgcaatgaaataccggaaagcaagatggaggcgggtgccatctccagtcctacttatcagggaaccgaaaaaggtgtaaaagcttatttcggtataaaatccaatgtgccttattggacggcaacgcttgtcacgggagaaggtgcgggaacagcggagcctactgatttctcgttcgcatcggatggcaccatcgtacatacgacccacggaagcaatacggaaaatatccctgtatacgtcaaacgtaaagaaagtgcttcaccgcgttcattcagagtgaaggtggaaggagtcggtttggacggacagacaaggagcatactgctcaccgtctcgcaaagcggatatgatttacgtgctactaccggattaagtagtctgggtaatatatctcaaacgggaggtacttatacggtgagtatccagcttactccgacggatatctccatacctgccggaaaactgtttttgcaggttatttatggaggcgtccaaaagtgtctcagtactaaagtgaatactgaaccgaatacgtatagttattctgtctcgatagaaattccagagaacagcagtccgagttctatcaatcttactgttaatattctactggcgaaagataccggagtgacagttcctctcggcagtccgtcaattacgcaaaacggctactgatgtcctctccttggatgaaaatttgataataaacatatacgatatgaacctaagaacaaaatataaaagatatttccgggcagcctgcaccaccttgctgttgctggcgttcgtgggctgtgcaaaagataaactggtagagtacggtcccggtgacgctaccggtaaggtggttatggtcagcctgaaagtcggtattccccccgctgtagagcctgcatcaacgagcggatattccgccgctaagtcgctttttagggataggaacgattccgggttgtcgtttacagtggctttggaacaaggacaagaaccacatgaggtaactacccgggtatctgacggcacgaccaagttacacaacctttggcttttccaattcgatgagcacggttccattaagggaaatcctcataaactgagtgatgcagtaacagccataaatgatttgatgacgatagacgtccccctcgtagtatcagagaatcaaaccttgtacctgttggtattaggccctaaacttaactatgatatgagcggagtgagcactcttgatgaactcaagaattggagttttgactatcttattaatgtagaagggcatacccaatcgcttatcaccgcagatgatgaagtaccgctggccggagaagtgtcaggtgtcactgtggtggacatcgacggtggtaagcgtggtctggtagaatacaacaaaccggccgggtttgtaggaggcatcgaaatcgagaggttgatggcacgcgttaccttacgttacaagttcgaggtggaaaattaccggttacaaggtttgaaattgctgaatgtgaacaatactatccggctcaccaatcttaaaaaaaataccgatgcggatacatacgccacatttgaaatggatcagttgggtgagcccgattccaatggctattactcggcaacatggtatgtagcgcagaatcggcaagggacggttacaactattctaagtgaaagccagcgctactacaaagtggtcaataaggtgccttcaggtgctgcgccgccactgggcacgcagatagaggcatgggcataccctactaccggaacaaatgaatacgcgatctaccagatatatgttgggaataataacaccaataacttcgatgtggaacccaaccatttttataatttgcgtactgccataaacgcagagataaactcggcgaagaacgatgaacggatcagggcatataccatcagccagtatgtggaatttttttccagccttaacgtaaaggcttctggggcgtcattcagcaccctgtacaacaaaacgggtgccacttatgacctggatgcagcttatagtgtccgcccgatagttatacagactcaaggaaggaaagtggaagtggaaatatatactgacgaagattgtacgcagagagccgataagggaagcagttggctcctcctgtcttcctcttccaactatacggatgcattcaataatgttaaagagccattggatacccgtgttacggcaagttccatacttcccactcaggtgaagttttatctctataataaggaatacatttatgatgatgacggcaaactggttgacccgggtgaatccgataaattaggaaagcgttctttatacattaaagtaactactatgccagagggtgaaggagaaacattgcaaactttccatatattcagactggaccagcgcccggcagtatatgccgggtgttttggaggagaaagagacactgacggaaactatacaatgggattggtgcatgacagaccgcaacgtagtgtataccagtatgacgtatcatcgggtaaagtggaatatggttacgatgggattgtgacagctgctcattcatacgggacggatgacgtgtattatggaaaaaacgcgacggtaaacctggccgagaatataaagaaccttacttggagtggtaatatacctgtcccgcagaaagatgcttccggacatatattgctatatcaatatcaacacccggctagtacgtttagtgcaagggcttgctatgataagaaccgggatgaagatggaaacggacgaatagaaggggaggagttaaaatggtatttaccggcatccaatcaactgattggcctctatatcggcagtctattagatgccagcagcgggcaaacaattacagaagatggaggtacttctgccaaaaggtggtattacgggcttaactcttactataagactgagggtggtgcaaggtgtgtaagagacatccctctcccttccgttacttattaatgataaaatgaaaatataaagaataaaatgaaaagaataactgtcataatcttcgcatccctttttatcttgctaaagggatattcccagacaatagaagtctatgaagatttaagaggaaacaagtatgcggctattaattcgaaagatttgcctaaacaaaggatcagagataaaagtgctgtcttttataacaacattcaattatacgagtacacctcgactggtcaaaatacgaatcctattaccgatagtgagggcaaccctgtttatacagacaggattatccggcatatagatagcatgtctgaggcaggcaaaatcaataagactgtatctgcattttttatagtctctccggatatcgtatatagcgatggcaatgatagcgagggaaaagacagtggaacgcaaacaatgaattgggctacggcaaatggctatcttgctacggcaaacagtaatagttatagtacggagaagaatattgctgttcccaagggatgcgcaatgtatcgggggaaagacggtcaggacgctccgggaacatggcggatacctacactgcgtgaaggaagcctgattatgatttattataaggaattagaggccacagctacccaaggtaccgattgtaaagcatttgccttatctgacataaaaccaaccacctattggttagcgacggaaaatacaacttcttctcaagcatggtcaatgacaatttatcctgatgcgacaagagtgaaatataagtctgccagagatctcaaggcaagctcctattatctccgttgcatccgggatattccatagaatagaaatataagtttgctcattcatttacaaaagatacaaaataactgatcaatcaaatgaaaacgataaaagccgaaatattaatgattgaaggagcgccgtttcctgtcatcaaagaaatatatgatccttcaaatgaaaggcgtaatgggaacattacaccggaagctcccattgttatcaccggtcacaatctggatatgttgacatgggaaagtaccaatctatatcttgtctcttccgtcaatgacagaatgttgatagaatgtggcgatatccataaatattcggacgataagatttatatgacagttcctgatattaatgaaggtgaatatttcctggcactgatgattttgatgaaagataaagaaagttttttatacatctttcccatatctttggtggtacagtttgctcaatcgaaatggcacgactgacatccgtatgataaaaataacggcaaacaacataattgataaatagcagtccatggaaaagaaccaaccatataagcaggataaagtattcgataatatattggaaacagaagagtttaacgtctatactaaaatagacgatttacctcttgatgaaaatcctatgtatcttgaagaagggataaatgggatatgcacgggaggaagtgcgttattcaatgtttttggtaataaacgacggattgtttccaatgatctggtagtcattttcccttttcagctggcttctgtcacggagattagcagtgacttttcaatgacgtttctaaaagtacccaaaagcctgtttatggatacaataagcgggatatgtatacctacgcttgatttctttttctatatgcggaaaaatttcagtactccgctatacgatgaagagtgccaacgtttcattcacttttgcaatattttgatttttcgtatcaacttaccccgcaacttattcagacgggagtctatcatgcagttattacgtgttttctactgggatatatatgtggcttataaaagaaatccgaaagctgccgaattagtaaaatacacccgtaaggaaaaacttttattcgactttttttgtttggtgatcgaatttcataccgtaagtcgggatgttgcgttttatgcgaaaaagatgtgtgtgtccgccaagcatcttacaatggtaattacagatatgagcggtcgttcggcaaaagactggattatagattactcccttcttgaaataaaggctcttttacgggattctgaccttgaaataaaagaagtggcctcacgcacgaacttccagtcgaactctgttatgacaagattctttcgtgaacataccggtatgactccgtctgaatacagggagagaatttacgttaaaaatgaaattgagttataattagttgagttatatatgaaataccgcctgtgaaggtcgtctattgtttgttttgtttgtgtggtgcaccttcttccaagagtaggaaaggaggtgcacctttttttatagctaaaaaagaatagattaaaatgtggaataaatagcttaaaatgctatatttgcaaaatagtcgcatttttaatatattggagtatgattttagagtttaaatttagaaatttcagatcagctaaggattggcagatattaagttttgaagcctctgcagataagatttcagaagaatattactgtaccactatcaacgatacgaaagtattaaaactcggtatcctctatggagctaatgcttcaggaaagactaacgtattgctagcacttgatttcatacgaaaaatagccatttcgcctaagataaacaagatgcagcctatcgggtttactccgtttctcttggatgatacgacaaagaaagaatgtggagtatttgaattgactttttttgtaaacaatatgaagcatctctattatcttgaagtagataatagtgctgtcctaaaagaaacacttaaatattatcctggtaagcaaccagccgaaattttctcccgagagaccattaatggaatcactcatatccgattaggaagcaaagtcaaactcaatgtggccgagcaggaaaagttgcaggtaaatacgcttagtaatatgagtgttgtttcagcttatgctacagctaactttatgtttcctgaattagaacgtgtctataactatttcttgaagcagtggttgcctatactcttgccccaaacggatttgaaaacatggacaacaggagaaatggaagcagagaaggagaataaatcctttttattagatttactgcaccgtgcagattttaatatatccggttttgatgttcaacaaaatgagaaaaataaaaaagatacggatttgatatttgaacatacgattgtagccaatggaacatcttctgttcattacctgcctgatatacttgaatcagcaggaacagtgcgctattatggtttgggaactattctgaatatattgcttgaaagaaatgctatcatacctgttgatgaacttgagaattcgctgcatccggatttatttgcccatttcatcaacttatttttggttaattcgacttattcgcagctgattttcagtacgcataatctccaatcattagacaccgaggatttacgtaaagatgtagtctggtttacagaaaaaaaggatgatggttcaacagacctgttttcacttgatgacttcaatatccgcaatggcgtttcgtttctcaatgcatataatgcagggaaatttggcgccaaaccaacactgggcggtatttttattcctaaaaaacgataagtatggcacgcgaaaaaagaataaaagaaatatctccattgatataaacaatccgcacacttcatattcaagggtatttgaagtgtttgaagaactattacagaagagatagataaactatcgtttcaattctatcagacaaattaaatagcttaatttaatttgagtcaggaaaatacagtgagtacaaaacagaatgtttttcgtcttatctataagtaaaaatatagactggaatgaaaagccgactgaaacaacgaatatttgcactttctctattagcatggacagccgtatgccctgccgatgcacagcaaacacgctcgcttcgcgatcaattcttaagtccttccgatgaagcaaaaccctggactttttggtattggatgtatggtgccgtgtctaaagaagggattacagccgatttggaggcaatgaaacgtgccggattaggaggtacttatctgatgccgattaaaggtattcatgaaggcgcccaatacgatggcaaggcgcagcagctaactcccgaatggtgggagatggtgcgtttcagcatggaagaagcagatcgtttgggactgaaattgggaatgcacatctgtgatggtttcgcattggcgggaggcccttggattactcctgaagaatctatgcaaaaagtggtttggagcgatacgattgtaaacggaggaaagctgatggctattcgcttgccacaaccgaaagcctatgaaaactattatgaagatattgcattattcgctttgccggtagaagacgcagcggatgagatgcaggcaaaaatcacctgtgtcaacctagctacgacaggaaacgtaaaagctgctcaaacagtgaatatggatgcggcgggagtgatccgttcttcatatccttgttatatccagtatgaatacgaacaacccttcacttgccggaacatcgaaatcgttttaaatggtaataattatcaggcacaccgcttgaaagtaatggccagtgatgatggagtgaattatcgtttggttaagcagttggtccctgcccgtcagggatggcagaatacggatgagaattcaactcatagtattcctccaactaccgcccgtttcttccgtttctactggactcctgaagggagcgaaccgggaagtgaagatatggatgctgccaaatggaagcccaatctgaaaataaaagaattacgcctgcaccgggaagcccgtctgaaccaatgggaaggaaaagccggactggtatggcgtgttgctcaagcgactaaagaagaggaagtcgggaaacaggattgctattcactttcacaagtcatcaatctaacaaagcaatataccggtcattcgaatggaaaaacattgaccgccactctccccaaaggaaaatggaaattacttcgcatgggacatacagctaccgggcataccaatgcgacagcgggaggtggaaaaggattggaatgtgataagtttaacccgaaaacggtacggaagcaattcgataactggtatgcgcaggcatttgtaaagaccaatcccgaaatagctcgtcgtgtactgaaatatatgcatgtcgacagttgggaatgtggcagccaaaactggaataaacgtttcgctattgaatttcagaaacgtcgtggctacgatttgatgccttatctacctctattggcaggtattccgatggaaagtgtcgaacaaagtgaaaagattctgcgagacgtacgtactaccatatcagaactcgtcgtagatgtgttctatcaggtattggcggactgtgcaaaagaatatgattgccagttctcggcagaatgtgtagctccgacgatggtaagcgatggtctactacattatcaaaaagtagatcttccgatgggtgaattttggttgaacagtcccacacatgacaaaccgaatgatatgctcgatgctattagcggagcacatatctacggaaagaatattattcaggctgaaggattcaccgaagtgcgtggcacgtgggatgaataccccggaatgttgaaagccttgttggatcgtaattatgcattaggaatcaaccgccttttctaccatgtatatgtacataatccctggctggaccgcaagcccggcatgacattggatggcatcggacttttcttccaacgggatcagacctggtgggataaaggggcaaaagccttttccgaatatgctacccgttgccagtcgttgttgcaatatgggcatccggtaacagacatcgcagtctttacaggtgaagaagtgccgaggcgttcgatattaccggaacgattggttccctctctgccgggaatcttcggtgcggaacgagtggaaagtgaacgcatccgtctggccaatgagggacagcctttacgtgtacgtccggtaggtgttacccattcagctaacatggctgatccggagaaatgggtgaatccgcttcgtggatatgcatacgatagttttaataaagatgcaatccttcgtttggcgaaagcagaaaacggacgaataacgttgccaggtggagcaagttataaagtgttggtactacctctttcgcgtcctatgaatcccgaacctgtgttgtcatcggaagtgcagaagaaaatcaatgaactaaaagaagctggcattttggttccttctttaccatatacagaagaagatttttccgtgtatggcttggaacgcgacatgattgtgccggaagatattgcctggacgcatcgtcgtggcgaacttggtgaactctatttcgtcgccaaccaaaaggacgaaacacgcacgtttactgcaagtatgcgtattaacggtaaaaaaccggaatgttggaatccggtgacgggtgagatgaatattcatccttcctatcatatcaacggaaaccggacggaagttactctcacattggctcctaacgagtccgcattcatcgtatatcctgcggagggagtacatgaaggctatggagaatcctctctccaactgcaaaaggagaaaaaagatacagccaaagcgcctttaaacatagcgttggaagcaaaggaatatactataacttttgtagctaacaaaaaaacgctcacacgaaaagaactcttcgactggagccaagaatcggacgaacagatacgttattattcggggacagcgacctacaaaaccacttttcgctggaaaaataagccgaataaagaccaacagatttatctgaatctgggaacagtttataatttggcaactgttcgtgtgaatggtgtagattgtggcacaatctggacagctccttatcgtgcagatattacaggtgccttgaaaaaaggaattaatgagcttgaaatagaggttacaaatacatgggcgaatgcactggcaggagctgatgaaggaaaagcgccgtttgatggcatttggactaatgcaaaatatcgcagggcagagaaaacgctgcttccggcaggattactcggacctttgagtttttctaccacagaataaaatagatttttaaggcacggattacgcggattacacggtttatgagaatcgtattacataaagtaacagcgcaatccatgtaatccgtgcccaattcattataatatagctaaagtatgaaaagttcaattattaaaacaggtacaatgttggcaggttttctgcttgctgcctgcctgtcaacacacgcagaagtaaagctaccggctattttttctgatggcatggtgatgcagcaacagaccaatgcaaacctttgggggacagcgactcctcataaaaaagtaacagtgaccactagttggaatggaaaacaatatgcagcaacagcagataaaaatggggcatggaaactgacagtagctactcccgaagcgggaggtccttatactgtgacctttgatgatggaaccaaaaagacactgaataatattctgataggcgaactttggctttgttccggacaaagtaatatggaaatgccgatgaaaggattcaaaaaccaaccggtagaaaatgccaatatggacattcttcacagcaagaatccgcaaatccgtctgtttacggtgaaacgtacttctacatttactccgcagaatgacgttgtcggttcctggaaagaagccaatccggttagtgtccgtgatttcagtgcaacagcctattatttcgggagactggtaaatgaaatattagatgttccggtcggattagttgtagcagcctggggtggttccgcctgtgaagcatggatgacggcagactggctgaaagcctttccggaagcgaagatacctcaaacggaaaccgacataaaatctaaaaaccgcactccgaccgtgctttataatggtatgttgcatccattaatcggtatgaccatgaaaggagtgatttggtatcagggtgaagataactggaatcgtgcccatacgtatgctgatatgtttacccgattgattaacggttggcgtgccgaatggaaacagggagattttcctttctattattgccagatagctccgtatgattacgggattattaccgaaaaaggaaaggaagtgataaattcggcatatctccgggaggcacaagcaaaagtagaacatcgtgtagctaacagcggtatggctgtattattggatgcaggaatggaaaaaggtatccatcccgcaaagaaacaggttgcaggcgaacgcctggcacttttggctttaactaaaacgtatggagtggaaggcgtgaatggcgaaagtccttattataaaagcattgaaataaagaacgacaccgtagttgtcagcttcgaacgtgccaatatgtggattagcggcaagaactgtttcgaatcgaaaaactttcaggtagccggcgaagataaagttttttacccggccaaagcatggatagaacgtagtaagatgctagtgaaaagcgataaagtgccgcacccggtagctgttcgatattgttttgaaaactatgtggaaggagatgtatattgcgacggattgcctttagggtcttttcgttcagatgattggtaatcgcaaataaacaaggtaaaatatgaaaaatatatgaagagattttatctgattataaccatactgtttgttggcgtgtcggctctttggagtcagcatgccaatgtcatttggaatactcccagtcataattcttctgaatctatgccctgtggcggtggagatatcgggatgaatatatgggtagaagacggtgatgttatgttctatgtgagccgtagcggcacattcgacgaaaaaaactgccagttaaaacaagggcgtgtacgtctccgcctgtcgcccaatcctttcaaagacgctaaagattttcgtcaggagttgaagctgaaagacggatatgtagaaatcgcggcaggaaacacacagatacaattttgggtagatgtttttcatccgattatacatgtagaggtaacaaatgcacaaccgttgcagactgaagtcttttatgaaaattggcgctatcaggaacgacctgtcagaaaaggagaggggcaacagtgttcctacaaatgggctcccccgaaaggtactgtgacggagtccgactttatttctttagacaaaattactgattcaacaggaaaggctgaaacaaataggacttcaataaaaaggaaccaacttctgttttatcatcgcaatcccgaacagaccgtttttgatgtagttgtagctcaacaaggaatgaacgaagtcaaatctcaaatgatgaatcctttgaaaaacttgactttcggaggaactcttttgggtgaaaacttagaatttgcaggcactgcggatgatgtatatgccggcacagactatcgtgcctggaagtttcgttcttccaaagcagcccggaaagaacatatctgtattgtgttacatacagaccagacagaaacaatagaagaatgggagcagggactacaaactgctttgcaaagaatagcccccaaaggtaaagtttcatcgaagactatcatacaggataaaaaacagacccgttcgtggtggaattccttttggcaacgcagttttatcgaagcagaaggggaagcaaaagaaataactagaaactacacccttttccgctatatgctaggatgtaatgcttatggcagcgtaccgactaaattcaatggcggactatttacctttgatccttgccatgtcgatgaaaaacaatctttcactcccgactaccggaaatggggaggtggcacaatgactgcacagaatcaacgtttagtatactggccgatgctgaaaagcggagactttgatatgatgccttcccagtttgatttttataaccgcatgttgaaaaatgcagaactgcgaagccgtatatattggcaacatgatggagcttgctttagcgagcagatcgaaaatttcggtttgccgaaccccgcagaatatggtttcaaacgaccggactggttcgacaaaggattggaatataatgcctggctggaatatgaatgggatacggttcttgaattctgccaaatgatattggaaacaaagaactatgcaaatgctgatattaccccttatttacctctgatcgaaagttcgctgacattcttcgacgaacattaccagcaactagcttcccgccgaggacggaaagcgttggatggcaacggacatctgattcttttcccgggttctgcttgtgaaacatataaaatgaccaataacgcaagcagcaccatcgccgccctgaaagtggtattagaaacatacggagagaaagaggagatgctaaaagcaatacctccgattccattgcgatacatagaaataaaagatacgttgaatccgactattgctccggtcttgaagcaaacaatttcgcccgccgtaagttgggaacgaattaataatgttgaaacgccacaactttatccagtgtttccatggcgtatttatggagtaggaaaggaggatctggatatagcccgtaatacctacttttatgacccggatgccatcaagttccgttcgcataccggatggaaacaagataatatatgggctgcctgtttaggcctgaccgaagaagcaaagaaactatctttagccaaattatcgaatggaccgcatcgtttccccgcattttggggaccgggatatgattggacacccgatcacaactggggaggtagcggcatgataggacttcaggaaatgctattgcaaaccaatggagaacaaatactccttttcccggcatggccgaaagaatggaacgtacatttcaaacttcatgctccgggcgaaacaacagtagaagccactctcaaaaacggaaaagtgacggacttgaaagttttaccggaaagtagaaaaaaggatattgttataatgattgaaaaggaaaaatgataattttgtgggatgccctgaaagggcttaattatatagcgtagggcaacgccctacgctatataattaagccctttcagggcatcccaataaatatataattgtaaggctttcagcctaaccgataaattctcatttaactgcaaaattcccattttaaccgataaattcccatttaacgaatgaaatatataaataaagaattatgaataaaagaccatttatcatcttatcagcttttctgttgctattttccttgatagaaaaagggcaggctacagaaacttaccgtcccgagacatcggttgccggattcatccagcttcccggtagcgggcgacaagtctataatttcaatccgggatggcgctttttcagaggcgatgtccggggagcagaagcggtaaacttcgatgaccgttcctggaatgtcgtttccacccctcataccgtagagttgatgccggccgaaggaagtggatgccgcaattatcaaggaccggcttggtaccgtaagcactttgtcctccccgccgaaacaaaagggaaacgggtagtgcttcattttgaagcagctatgggcaaacagattctttatctgaatggtaaacgcatccaggaacatctgggaggttatctgccttttactttagacttgaccgccaatggcgtacaagccggagactcctgtctgctcgctgttttcacggacaacagtgatgacaaatcctatcctcccggaaaacgtcaatatacattagactttgcttatcatggtggcatttaccgtgatgtatggatgattgccaaatctccggtagctattactgacgctattgattcacaaatcgttggcggtggaggtgtattcgttcattttgataagatcagtgaaaagagtgcgcaggtatatgtaaacaccgaagttcagaatgacgacgcccgttccgagtcagtcactgtagaaacgactttgacagatgcggatggaaaagtaatcaaacgcagttcaggaaaactttctttaaagccgggagagaagaaatccatccgtcaacagatggaagtaaagaatcctactctttggtcaccggatacaccttatttatatagggtacaatcacgtattaaaaaaggaaataaatccattgacggaggcattacccgtgtcggtattcgtctggcagaattccgtggtaaagacggattctggctgaatggcaaacctttcggacaactggtaggagccaatcgccatcaggattttgcatacgtaggcaatgctttgccgaactcacagcaatggcgtgacgccaaacgtctgcgtgatgtcggatgcaccattattagggtagcccattatccccaagaccctgcctttatggatgcctgtgacgagctcggtctgttcgtgattgtcgctactccgggatggcagtactggaacaaagacccgaaattcggagagttggttcatcagaatacccgcgaaatgattcgtcgtgaccgtaatcacccttctgtattgatgtgggaacccatcttgaatgaaacccgctatccgctcgattttgccttgaaagctcttgagattaccaaagaagaatatccctatccgggacgtccagtagcggctgccgatgtccattcggccggagtgaaagagcattatgacgttgtttatggctggccgggtgatgatgaaaaagaagacaagccaaagcaatgtatctttacccgtgaattcggggagaatgtagacgactggtatgctcacaacaataataaccgtgccagccgcagttggggagaacgcccgttactggtacaggctatgtccttggcaaagagctatgacgagatgtaccgcacgaccggtttgtttatcggtggcgctcaatggcatccgttcgatcatcagcgtggttaccatccggatccttattggggtggtatttatgatgctttccgtcagaagaaatatgcgtatgaagtatttcgcagccagtcgccggccagccttcaacacccattggcagaatgtggcccgatgatattcattgctcatgaaatgtcacagttctccgataaggacgtagttgtattcacaaactgtgattcagtccgtctttctatttatgatggaacgaaaacctggacgaaaccggtggttcatgccaaagggcacatgccgaatgctcccgttatattcgagaatgtctgggacttttgggaagcacgcggatatagctatactcaaaaaaactggcaaaaagtgaacatggttgccgaaggaatcatcaacggaaaagtggtatgcactcaaaagaaaatgccttcccgacgttccagcaaactacgtctttatgtagatactcaaaaagtgaacctgatagctgatggctccgactttatcgtcgtagttgctgaagtaaccgatgatagtggaaatgtgcgccgtctggcaaaagagaatatcgttttcacggtagaaggtgaaggagaaatcatcggagatgctactattggcgctaatccccgtgcggtggagttcggctctgctccggtgttgattcgttctacccggaaagccggaaaaataaaggtgaaagcccgcgtacagtttgagggcactcaagctccgacagctactgaaattgaactggaaagcgttcctgcagaatttcctttctgctatgaggaacagacttatgaaatacaaaggacaacaccgtccactctcaatgtaaacccgagcaaagaatcatctgaaggaaaagtgcaactgacagaagaagaacgccaacgagtgttggatgaagtagaacgtcaacagactgaatttggaactgaaaaatagtacgataaagtgattagcaggttagtgattagtgattagcggggtgacctgccaacttgttttttatatgttactaaagcactattcaaaaaaaaagactatctttgagtacgtttaattccaattatagccatcaatgagaaaacggaatattctaatactattactatccatgataggcatgtatgcttttgcctatccaaatatgattgtagaacactacacggctgaacgtggtttgcctaataatatcgtaaactgtacattaaaaggacaagacggatttatctggtttggtacctggtatggactatgtagctttgacggaagtaaattccgttcctacgataatcatgacggcttttattccacagatattccgccgcgtaaaattcagcgtatcgtagaagataagaatggttttctgtggattaaaactatcgaccgtaaactctatctgttcgataaacggcatgagagctttcatgccgtctacgacgatgtgaaagaatattccgaaaacattcagattatcaagattcagacgaccgaagacggcgacgtattgttgctgacaaaagataaaagccttttgcgtgcgtacaccgacaaggaaggtaaaataacgatgaaacaattgcatgattcgcgtcctaacgtgaacgtgtacgacatgcgtctgaaacacaacatattctgcgaaacagccgaatttatcaattggatcggtatggattatcagattctgtccctacggaaaggggaagcgctgaaagacaaacctgccgactttatacagaaaaaggtatctgctaacccggatcagtttacttgtgcctcctataattctaaattcttatggttgggagacaagaaagggcatatttatagcattgatccgcaaaacggagttgtcaaccgttacgagataccggaaattaaacagccggtttctaatttgctggtaacggaatccggtctgatgtacattaccactaacgaaggagcatacgagtataatatcggctacaagcagttgaccaagctcccctttaccatccccgaaaaggacaatggaattatattctatgataaatatgataaggtatggtttcaggagggtaaccaggcattgacctattatgatcccctgaacaggagccatcaccgctttacattccccaatcagaacgcaatcggcaattttgaaatgcaggatgccggcgaacagggcatgttctttatgactccgggaggagaaattcttctattcgacagggagaaactggaaatgacccgtatcaaccaattgaagcctttctccgacgatcttcccaatcagcttttcttccatcttctgctggataaagatggcatcctttggctggcatctacaagcagcggagtataccggcttaatttccccaagaagcaattccaactgctgacagaagtttctccatctccggtagtgcccgaaagatcgacttcctggaaccagggaatacgtgctctcttccaggcgcaaaatggggatatttgggtaggaacccgctggcaagctctgtatcgcctggatcgtaacggacaagtgaaacaaatcttctcggataagaactatctgttaggagccgtatatcatattatggaagacaaagacggtaatctttggttttccaccaagggaaacgggcttgttaaagccgaaccggacatgaattcaccgcacgggttgcgttttacccgttatatcaatgaccccaagaatccgaattctatcagtaacaacgatgtgtactttacctatcaggacagccagggacgcatttgggtaggattactgggaggaggtctgaatctaatttccgaagagaacggagcaattacctttatacataaatacaatggcttgaaacaatatcctgcatacggtctttatatggaggtacgtaccatgacggaagatgaagacggacgtatttgggtaggaacaatggatggcctgatgtctttcgacggacatttcactacccccgaacagatccagtttgaaacgtaccgccaagtcagcgaaaattcaaacgtagcggataacgatatttatgtactctacaaagatactgattcgcaaatctgggtaagtgtattcggaggcggtttgaataaattagtccgctatgataaagaaaagcgtgaaccgatcttcaaatcatacggcatacgcgaaggaatgaataatgatgtagtcaaatccatcgtagaagataaaaacggcaacttgtggtttacaacggaaattggcttgtcctgcttcaataaggctaccgaacagtttcgtaactacgacaaatacgacggtttcctgaacgtagaactggaagagggtagtgccctccgtaccttgaatggagacttgtggattggtacccggcagggaatcctgacattctctcccgacaaactggaaacattgcatacgaactacgatacacgtattgttgactttaaagtttccaaccgcgatctgcgtagtttccgcgaatgtccgattctgaaagaatccatcacatacgccaaagcaatcgaactgaactacaatcaatccatgttcacgattgaatttgccgcattgaatttctataatcagaaccgggtatcttatcgatatatacttgaaggatatgaaaaagaatggcattataacggaaagaaccgtatagcttcttacactaacgtacctcccggcgactatacattccgtgtagaaaccgtagatgaagccaatccggagctggtttccaactgtacactggccatcactatccttccaccgtggtggttgagctggtgggcaacccttatatatgtaattctaggtttggcagctctctatttcagcctgcgcctggctttcttcatgctcaaaatgaagaatgatatttatatcgagcagaaggtatcggagatgaaaatcaagttctttaccaatatctcccatgaattgcgcactcctttgacattgataaaaggtccgatacaggaactaagagaacgcgaaaagctctctccgaaaggattgcaatatgtggatctgatggagaagaacaccaatcaaatgctgcaattagtgaatcagatccttgatttccggaagattcagaacggcaagatgcgtttgcatgtgtcattaattgattttaatgagatgatagcttctttccagaaagaattccgggtactttccgaagaaaacgagatcagttttactttccagttgccggatgaaccgattatggtatgggcggacaaggaaaaaatgagcattgttatccgcaacatcatatccaacgcattcaaattcactcattccggaggaagtatttatataactaccggattgacagacgacggtaaacgttgttatgtacgggtggaagataacggagtaggtattccacaaaataaactgaccgagattttcgaacgcttctcgcaaggagagaacgcgaaaaactcctattatcagggcacgggtatcggattggcactttcaaaagagatcgtcaatctgcatcacggacagattcgtgccgaaagtcccgaaggacaaggagcggtgtttattgtagaactcctgatggataaggaacattaccgtccgtcagaagtagacttctatgtgggagatacggagacagcccctgtttcggtagaacaagatcctgttgcaaatgccatatccgaagacggtacggaagaagaaccggaaatcgacgcttcattaccgacccttctgttggtggaagataacaaagacctttgccagttgataaagcttcagctggaagacaagttcaatatccatattgctaataacggagtggaaggtttgaagaaagtacatctgtatcatccggatattgtggtgaccgatcagatgatgcccgaaatggatgggcttgaaatgttgcaatccatccgcaaagatttccaaatcagtcatatccctgtcattatcctgactgcgaagaatgatgaaggcgccaagaccaaagcgatcactttaggggcgaacgcctacatcaccaaacctttcagtaaggaatatctgttggcacgtatcgaccagttgcttgccgaacggaaactgttccgtgaacgaatccgtcagcaaatggaaaaccagacgacgaccgaagaagacagctacgaacaatttttggtaaagaaagacgtacagttcctcgaaaagatacatcaggtcattgaagaaaatatggacgacagtgactttaacattgacaccatagcatccggtatcggattgagccgttcggcattcttcaagaaactgaagagtcttactggcttggcacccgttgacctggtgaaagagattcgtttgaataaatctatcgagctgattaaaaatacggatttaagtgtttccgaaattgcttttgctgtcggattcaaggattcgggatattatagtaagtgtttccggaaaaaatataatcagtcccctcgcgaatatatgaatgaatggcggaaaggagagagataaccgattacaaaatgctttcttaatcgtccttttagaaacctaattaagattcgaaagaatgaacaacattaagaaagtattatcagcgtggatgctggttgcctgtgtactacctgtggcagcccagtatcctgtaattccggactcggtaaaagcaagaggagcaaaacaagaagcggagtttgaacggaaatcggatgcggcatgggaaaaagctttgccgacagtgttagaagaagcaaagaaaggtcgtccctataagccttgggcctccaaacccgaagatttgataaaaagtaatatcccggctttccccggcgcggaaggcggaggtatgtatactcccggtggtcgtggcggtaaagtgatcgtagtcacttcgctggaagattccggtcccggaacattacgcgaagcctgcgaaacgggaggtgcacgtattattgtattcaatgtagcgggagtgattcggttgaaaagcccgattagcgtacgtgccccttatgtaacgattgccggacaaacagctcccggagatggtatctgcgtcaccggacaatctttcctgatcgatacacacgatgtcgtgattcgccacatgcgcttccgccgcggtgcgcaggacgtagctttccgtgatgatgcagtaggagggaatgcggttggaaatatcatgattgaccattgctccgccagttggggattggatgaaaacatgtctatctaccgtcatgtatacaacagaggggcagacggacacgggctgaaacttccgacagtaaacattaccatccagaattctattttctctgaagcattggatacctacaatcatgctttcggtgcaaccatcggtgggcataacagtatgttctgtcgtaatctctttgcttccaacatcagccggaatagttcggtaggtatggacggcgactttaacttcgtcaataatgttgttttcaactggtggaaccgttccgtagacggaggcgatcacaacagtttctacaatatgataaacaactacttcaaacccggtccgatcactccgataggtaaaccgatttcttatcgtattctcaaaccggaagcaggacgtgacaaaaacaggccgctttcattcggaaaagcatacgtaaatggaaatattatccatggcaatgccaaagttacaaaagataactgggacggaggcgtacaacttaaagaagaggtggacgccacaaagttcttgccgctaattaaatcggacgaggctttcaaaatgccatcggtaactgtaatggataccaaaaaagcttatacctttgtattagataatgtaggagctaattttccgaaacgtgacgcagtagatgcacgtgtcattaaaaccgtacaaacaggaaaggccatttatgcgaaagatgcaccggagtttgtctctccttacgtgaagagacggttaccggctgattcttacaagcaaggtatcatcacagatattcgtcaggtaggcggactgcccgaatataaaggtaaagcggtagtagactcggacggcgacggtatgccggatgcttgggaaatagctaacggattgaatccgaatgacccgaccgacgccaacatggactgcaacggtgacggatataccaatattgaaaaatacatcaatggtatagacaccagaaagaaagtggactggacagacttgaagaacaattacgatacattgtctaaacggaaaagtctgttgtaaccggatgaaaagagattaaagtttattgtaatgaatatacaagtaagaacgatccttttaggattattgagcattgggtttgtgcaaagttatgcgcaaacctttgctttacaggttaagaatgaccagatcacttacctgaatgatgatcggggaaaccggattctcgatttctctacatgcggatataaatcctccgaacaggatattccttctgtccgtaatgtggtgtttgtaccctggaaagccggagataatactgcgcgtattcaacgtgccattgattatgtagcttcgctgactcctgacgcttccggttttcggggagccgtattactcgatcagggagaattttccctgtccggcagtattcgtatctccgcatccggaattgtattgcggggtacggataaagaaaaaacaatactgctgaaaaaaggcgtagacagaggtgcgcttatctacatggaaggaatggacgacctgaatgtgcaagacacattgaaggtgctttcccactatgttccggtaaacgcgagaacattggaagttgcttcgggtgtttctctgaaaaaaggagatcgcgtcatggttacccgtccttccggcaaagaatggattgcctctttgggttgtgatatttttggaggaggtatcagtgctttgggatggaaagaaggtgacatggatctgacttgggacagaacagtctgcgaagtaaacggcaaccaggtaacactggatgctccgctgaccgtagctttggatgccaactatggaacttcttccctgttgacttatcaatggaacggacgtattcacgattgtggcgtagaaaatatgacactgatttctgattacgacaaacgttatcctaaagacgaggatcattgctggacaggtatctccattgaagatgcggaaaactgttgggtgagactggttaacttcaagcattttgcaggaagtgctgtaattgttcagcgtacaggttccaaaattaccgttgaagactgtatctcgaaagaacccgtttcagaaatcggagggatgcgtcgttgcactttccatacgttgggacaacaaactttatttcaacgctgctattcggaacagggtattcatgactttgctgccggatattgtgcagccggtcccaatgcttttgtacaatgtgattcgtatgaatctttgggattcagcggttctattgatgcctgggcatgcggactgttgtttgacgtagtaaatatcgacggtcataacctgactttcaagaatttgggacaagataaaaacggagctggttggaatacggcaaacagcttgttttggcaatgtaccgcagcggaaatcgaatgttatgccccggcaaaagatgcgatgaaccgtgcatacggttgttgggcacaattctccggtgacggtgaatgggcacagtccaacaatcatgtacaacctcgtagtattttttatgctcaattgggagaacgattgaacaaagaatgtgcagaacgtgcacgtattctgcccagaaatacaagtgcaaccagtagtcctacagtggaagtagctatggaactcgctaaagaagcatataaaccacgattgacgttggaacattggatcggcgataacaagtttgctccttcggtggcatcagccggagtaaaatcaatcgatgatattaaagagaaaaagagcactgcacttgcaaattcttcttctttttctgctgctaaattattaacccaaccggaagtaactgtaaccaatggacgtattcagatggacggagctctattggttggaggtagtcataccaccccttggtggaacggaaagctcaaaaccaattatctgaaaaaggcaagtccgaccatcacccgctttgtgccgggacgagagggattgggattaaccgaccgcattgattctgtagtcgactttatgaaacagaaaaacattcttgttttcgatcagaattacggtctttggtatgatcgtcgccgggatgaccacgaacgggttcgccgtcgggatggtgatgtatggggacctttctatgaacagccattcggtcgtagcggtcagggaacagcatgggaaggattgagcaaatatgatttgaaacgccctaatgcatggtactggagccgcttaaaagaatttgcagaaaaaggaaataaggacggactgctgttgttccatgaaaactatttccagcacaatatattggaagccggtgcgcattgggtagattctccatggagaagcagcaataacatcaatcagaccggatttcctgaacctgctccatttgccggagacaaacgaatctttgtggcggatatgttctatgatatcagtcatcctgtccgtcgtgaactgcacagacaatatatccgccaatgcctgaataacttcgcggacaattcgaatgttattcagttgacaagtgccgaatttacaggcccgttgcacttcgtacaattttggttggacgtgatagctgaatgggaaactgaaaccgggaagaaagcgaaagtggcattgagtacaacgaaagacgtacaggatgcaatccttgcagatcctaaacgcgctgccgtagtagatattattgatatccggtactggcattataaaacagatggaatctttgcgccagaaggcggaaaaaatatggcgccacgtcagcacatgcgtaagatgaaagtgggaaaggtgactttcacagaagcatataaagctgtcaatgagtatcgtcagaaatttcctcaaaaggcagtgacattctacgcacagaattatccggctatgggatgggctgtattcatggcaggaggttcatgtcctgtaattccgtgcacagataaagcgttcctgaaggatgcagcagccatggaagtggaagaaacaaatacggatgagtacaagaaaatggtaaaatctgatattggaagtatcatttattccaagtccggaacagaaattcctgttcaattatcgtccggaaagtatgtattaaagtacattcatcctgcttccggaaagattgaaacgataaataaatcactgaaaataaatggcttatacaatctaaaggtgccagataagaaagaaggcatttattggttccataagttataaagcaaagaatcccgttgaagaccattcagcgggatttttgctttttattggtaatttctagtaaaagagtgttataaaacatgatacttgttttttcaatccacaaaccagattttacccaaagttgcggtcgatactgcttagttttgcaacatcaaatcaatcgaattaatgctatgatggaacagactaatcattcaaccgacactttgctcgcttcttttcaagcgggaaacatggcagctttttcacagctgtataacttgcacatcaatgtcctttttaattacggattgaagttgaccattgataaagagttactgaaagattgtattcatgacatcttcgtgaaactctatacaaagaaagatgaattaggaacaatcgataatttgagatcttatttattcatctccttaaagaataagttgtgtgatgaacttcgcagacgtatgtatatgtctgatacggcagtagaagaagttagcatatccactcctacagatgtagaagatgattatatggaagaagagcaacgcaaaaatgaattttcattggttagacgtctgctggatcaattatctccccgccaacgcgaagcgcttacattatattatatagaagaaaagaaatacgaggatatctgcgagattatgaatatgaattatcagtctgtacgcaacttgatgcatcgcggattgacaaagttgcgtagtctggcaagttaattttagtaaaaaggtaaatgggttgagtacatagacaggataacgccgtcctacttatgtaaacgcttaaaaaggatgcgatatgtgctcaaaggtaatggattttttgacggatgatgattttatcaactatgtgctgggtgtaactccgcaatcagcttcccaatgggaaacttatttcagagagcacccggaagagatggcagatgcagaagaagctaaagctgtattattggctccggcaaatgtagactgtggcttctcaatagttgaaaataacgaattgaaagataggattattagtagtataaaagatttttcgggtattttgtagataggttagtatagttaagataaagtagttaggttagttaaggcattaaaagattgacgcagtctttcacaggaagtttaattttaaacactgtgaaaggctgcgttttttatttgttctattcaggtttatcgctagattcctgaatattgaaagcactactgaaactgacaattaatacgatgcatccgcccaatataccgataagcatataagcgatacggatatcgaacgcctgcgagatggcaccgataagcaggggagcaatcaacgaacctataaaactgatacttgacagaatggtaagtgcaatactgaccggtgtttttgatttggctcccacgaagctgtacaaagtaggcacaatgcaggatattcccaagccgaccagcatgaaacccaaagaattgataattactttcatggccatagattcgaaaactcctcctaacagggcagaaacaaaaaagccgatacagataaagctgcccgccagttgcaggactttcttctttccccaaagctgataagcatagttagtcaagaaacggcccgttgccatcataatcataaatacaagaaaaccgatttgcaatgatttaggtacatgaaccactgattcgaaataaacggcactccagtcgaacatcgcactttctacaatcagtgcgaacagtccgacaagtcctaactgcaaaagcaacatttctggtttttgaaataacaggcgaaaaccattgggagctttggctgtatttctttcctgcgtctttgtatcagaaacttccgtttcctgcggtgcgctctcctgcaaatatttccgcccggaaagtgcaattataaggatgatgataaatatcagtgtataatgccagatgggggagactcctgccaaaatcattacgaagccgataagtgctcctgcacatgcccccagactccatcctccatgaaaagtggccataatggttttaccatagatacgttccacctcaatgccttgtgtattgaatgatatatcgcacaaattccagcacacaccgaagcaaaagagcagaaagcctaatagatagacctcatgggccagcccaatgcaaagcagagatgaagcgtatcccaagatactgacctgtaccatgctccggcttcctaactttgaaacaagataaccagccaaggggatcgcaacaaattttccgacagggatcataaataaaatcagtccccagtagaaagcataatttgcggcaaaaacgtctttgaaatcagggattcggctggcccaacttgccatacaaagtccttgagcgaagaaaaaagtcaatatggcaaagcgtattctctcttttggatgcgtaaattggttattcatgcattttttatttttaatcgcggcaaaggtatctattttttttgtacttttgcgcccgatttaaaaatatcatattcatgaagacaggcgaatctttattatccataggtaaatttattgcagaatattcagcccatttaatgggagccggagtacacacctcgcgggtagtacgtaacacaaagcgtattggagaggctttcggactagatgtcaaattaagcgtatttcatagaaacatcattctgactattatagacaaagaaacaaacgaggcttgtaacgaggttatagacattcctgcacacccgatcagttttgaacataattcagagttaagcgcattaagctgggaagcagtagacaatcatttgtcattggaagaattgaaagacaaatacaagaagattatttctgctccgcggatacatccgcttttcgttttactactggtaggatttgccaatgcgtctttctgcaaattgttcggcggtgatttaatttcgatgggaattgtgttctcggctaccattacaggattctacctgaaacaacaaatgcaggcgaaaaagatcaatcattatgttgtatttatagtctcggcttttgttgcttccctgtgtgcttccaccgcgctgattttcgacacaacttcggagattgccatggcaaccagcgtgctttatcttgtgcctggggtgcctttgattaatggcgtgattgatgtggtagagggatatgtattaacaggatttgcccgtctgacagaggcttctttgttgattgtcagcatcgctatcggactttccttcacattattaatggtaaaaaacagtttaatttgatatgatagcacttgacattcttacggatggattttttgcagcaatagcaggtataggatttggtgcgatttccgatcctcctttgcgtgcattcaaaatgattgccatactggcagcactgggacacgcctgtcgtttttgtttgatgacctatttaggcgtggatattgccacaggttcgttgtttgccggattagtcatcggcttcggtagtttgtggttagggaaaaaagtatattgcccgatgacggtattgtacattccggcgttacttcccatgattccgggaaagtttgcatacaacatggtattttcacttatcatgtgtctgcaaaatgtgaatgatccggataagctggacaagtttatgtcgatgttcttctctaatactctgatagcaagcacagtgattttcatgttggcggtaggagctacgttcccgatgttcctgttcccacatagagccttttcattaacaagacactaaaacgaacttttatggagattttttggagaacaattgcatattataattcagctacttggctgttacagatagttatcattctgattggtattgcattgaccggattgcttatcggcagaccacgtccgtgggtgaaaatggcgatgaagttctatatgataggtctgtatacgtggatttctctggtctactattatatctactgtgaagagcgtagctataatggggtgatggctatgttttggggtgtgatggctatcatttggatatgggatacgattacgggatatactaccttcgaacgtacccacaaatatgatctactgtcttatgtcctgttggcaatgccttttatatatcctttggtttcattggcacgcggactttcattcccggaaatgacttctccggtcatgccttgttcggtagttgtgtttaccatcggattgttattgctgtttgcgcaaaaggtcaatatgtttttggtattgttcctttgccactggtcgctgatcggattatccaaaacttatttctttcagattccggaagatttcttgttggcaagtgccacgatccccggcctgtatcttttctttagggagtatttcctgaataatctgcatgccgacaccaagccgaaagcaaaatatatcaattggctgttgataagcgtttgcgtcggactggccgtgttgctgactactaccatgtttttggaattggttccgaaaggttaatccggaaacatagaagatattcaaatcaaaaaagaggccgttcaaaaaagccttgattttacaaaatcgtccttactacgataggttgtagtaaggacgatttttcttttagaaactttgggaacagtttcttttatatatcgtatcgtttacttaattgcgtagaatatccgtaaggcacactgcatcactgcatcaggcaaccattttttgctcttcgcaaacaacacctgtatccatggacctactttcgtccgaaaaggaggattggtacgttccactatcttacagatggcagcacccaacttctgcggatggcatccattacgttcctctttttctataatctccaatgatttcagaaaactttctccgtaatcagcatccagtcttgtctgttcggagatattccggttatcagtaaatccggtgttgaaatctcccggttctactacacaaacctttatatggaacggatgaacctctaaagccaatgcttcgctatatccctccactgcaaatttcgaagcagaataaaatccctgataggggattcccattacaccaccgatagagctgatattgataatcttgccctttcgcgcctttctcatagatggcaaaactgctttacacatattcactacaccgaagaagtttgtattcatttgtatattcacttcttcttcagtagcaagttctaatgcgccgccgatacctattccggcattattaatcaatacgtcaatccgtccctgctccgatagaatccgctctacggcctgacaaacggaaaaggaattggtaacatcgacaacaagcatctttacttgattcatgtcttcggaaggtttccggcttgttccataaacgatgtgccctcgttccgataacatttgagcggtaatcttgccgaatccggaagatgctccggtgataagtatgacttgtggttgcatatttcttgtatttccagcaaatataaagagaatatccgaatgtttagtttcataacatgcaattcctatatagaagcaataaaaaaagtggaggcatgcgctggttaaaagtaattaaaatcaattcagataaagagtgtatgattgcaatattctcttttttattatttcttttgtatatgtttaaatctaataaatgcacaaactaaaattttagatgatgaagaaatgtatttttacactctgtttgattatagtttcaggatttctttcagctcaatctgtagatcgtaaaatcccccttaaaaagggaaagagtaggcatttgcatgctaatctcatcttgcaaaataaacttccagtgaggggaatgatagaatccggtgtccctatcttggttatggatagcacctttgtatttaatcatttagacgacttaaacatttcattggttgaatcaaaagcaactttgaatttagcgggaaacaagtataaatgtacacatataaccaatgatacaatttttgtaaatggtctattttataaaggcaaaactgtcattgctaatatagcttctaaaaagatagatattatgtatcccattcatctttttggagatctaaacgatgctaatagcaagattatggaactaaatatttcatctaaatacatgatgccactaacccgacaagaattggaactgaaaaaaagtaaatataagaaataccccatgaggaatgatggatatggaaatatgtatgcaatcgattctgaattaaaagtagcttccaattctaaatattattactctctcgagggagattttctattagacctaggaaacgcttcatttctatttctcttggaacaacaccctgcctataaagagtttatcgataattctaatatagaacttcggcaagggaacgatagtcagggaagaaagatgccagtgaaggcatttctagcaaaaaaatgctatatggctgatgtgcctttttatgatgtaactatagcaataaccccacaacttcccaagtttactacagtcggggttttaggattgaagttttttgaagaatttaatgtaatatttgattttggcgaaaagattctctacctgaaataaaatagagagaaaatcagtatatatgatagtagcatgagtatgatactatcatatatacactataaaaattagtaatcaatatgattatttctctaagatagcagtcattttctcccgccaatcttcaccattcttcggctggaacgtttcaaatcccagttctttgccgatttggatattagaggcgccgtcatctacaaataaagtttcagaaggaataatattgcaatcgttcaccatataatcaaatatttcgggtgcaggttttgtgtgaccgacctgataagacaaatatagtttgtcacaataatcattcaacggctttttcttcgatgagaaatcggggctgcatgcccacgacataacaaaaggattggtattacttaaaatatacacatgataggactttctcaattccaatatataatcgagtttatttagatttacttcgttgaaaaagcccagccatgcctgtttggtttcctccatcgtcaatggacggccacataaatcccccagctgtttccgaaactcatccgcacttaacttaccttcttccagttcttgaaagatgccggtctggtgatatttatccagccgggtatcagcatctgccagtcccagtttgataaatgcctgaaccgctttgtcacgatcaatatctacaatcactcctccaaaatcaaatacaatgtttttaatcatgatatataattttcttgtttgctacaaagatacggcttatcttcttaattaatagcccgcatcggcttgatatttgtcaaaaaacatagtgacgctatcctgtcaggatagtgacgccatttagcaaggatagtgtcactataagaacaggatagcgtcactatattttgtgtaacttatagaagcataaatgccgattattttttatatttgcaaatccaatcaatcctttgcaaagacaaaaatagagttatgaataatcttcgaattttattgtatatgatgctcctttcactagctgcctgccatccggaaggaacaagcgtgaagcaagggctggacaaggctgcgcaactgatggagcaggaccctgatacagcatccattattcttgagactattcagtcaagccaaatgaatgaagctcaactggcagagtataatttattgtgtacccagctcaacgaggataaaaacattcctcattcctctgataagcagattaggcaggcggcatcttattatgagaaacacggtgatgaatatcaaaaatctaaagcatattattatcttgcttgtgtagaaagtgatttggaacagaaagagaatgcagagatccactttaagaaggcaatcaaacttgccaaagaaacagaggaatacgatcatctggcaaaaatatgcaaacgatgtagtctttattatcagaaatatggtaactttgatgaagcactggaaatggaaagaaaggcatacgccagtcagttgatattaaatgataacaaaagtgattcttcggtcattctgtcttctgctttaggtatgtttggtgtgatgtctttgttgcttggactactctggaagaaaaaccggcacgcactttcccaactggatcttttcaaagaggaaatactgaagaaagatgtcgaatcggataagctgatgttgcgatgtaatcatctcgaagagaagtatcagtctcttcagttacatatctatgaaagttctccggttgtctcaaaagtacggcaatttaaggaacggaatgttttgtcttctaaaatcccttctttctccgagaaagactggacagagttgctgcgacttcaagagaatgtctatggacttgtttctaaattgaaagggataagtccaaaactcacggaagaagatttaagggtatgtgcttttctacgggaaggagttcaaccggcttattttgctgatttaatgaaactgactacagagacgctgacccggagaatctccagaataaaaacggagaaactgatgttggcaaattctaaagagtcactggaagatattgtgaaatcattgggggatctttcattttgtgcaagaaattaattattatctggtaatgattcattatctccttactacatttaaggcttttcgttgcagagattaatgttttttggtacagaaattagtaatcttttatgcagtcgggtagttgtcccgttataacgggacgatgggcatcctatagggtgacaaatgtcactttataaggtgatatttgtcattctgtaatatgattatctgtctttagaagaatgaaagtcattaaagatacgaaattaaatagcaaaaaacaagagtggcacttgtttttcctaatatcccaatagttttttcatatttgatacattgtcatttttatgccatttactttactatgccattattaatttgtacctaatttatcctctgtctgtttttgtctatctcttcacttttattattattgattatcaacatattatcattgacgaccgtccgtatccgtccggtaaaaaatgcctgttttagcagtatgtcctgtaactttgcaaataaaaaagtacagaacaatgagcaacttattatttaaaagatggaatgatttcggtgggtggctggtctttctgatagcagcatttgtgtatgggatgaccatcgaaccaaccgcaagtttctgggattgtcccgaatttatttcttgtgctgaaaaattacaggtagggcatccgccgggagcacctttctatatgcttgtcggcaacctgtttacccagtttgcttccgatgcttcgcaagtgtcgggaatggtcaactttttaaatgcactattgagtgccggttgtatcttgtttcttttctggagtattacccgattagtgagagccttgcttgtgggcgatgaacggaaattatctgttatggatgttattatcattctgggagcaggttttgtgggagctttagcttatactttcagtgatacattctggtttagtgcggtagagggggaggtatatgccttctcttctttcctcacagccttggtattttggatgattcttcgctggcaggatgaagcagattctgtgtccggtgaccgctggattatcctgatagcctatattatagggctttcaatcggagtgcatttgcttaatctgctttgtattcctgccattgtattagtgttctattaccaaaaatatcagactctatcactcaagggagttatcggggccattgcattatccggtattcttattgtattgattctttttgtttatatacccggaatggctgatgtaggaggatggttcgaattattctttgtcaatgtgatgggattacccttccagtcaggattgatcgtctttctgggtttggtcctgtttttactgataggagccatttatcggttcagaaaacgcatcgtgaataccggtttgtggtgtttactcatgctcaccataggatataccacctatgcggtcatactcattcgtgccaatgctaatacgccgctcaatgagaatgcaccggatactattttcacactcaaaagctacctgaatcgcgaacagtatgaaagtgctcctttactttatgggagaacctatgcgtccgaaccggagtatgtgcccgaaggagactattacaaggtaaagacagaaaaaggtagtgccatctatcggccggataagaaagaaggcaagtataaaattattcgctataaggaagacgtgtgctacactcaaaatatgttatttccgcggatgtggaatgatcgttcggccgcttcttacaaaggatggtccggtggaggtgcgaatgaggctcctacacaaaaagagaacctgacttattttatcacataccaactcaattacatgtactggcgctatttcttatggaattttgtcggacgacagaatgatattcaaggaagcggtgaaccggaacatggtaactggattacaggaatttcctggcttgataatctgcgactgggggatcaaaaacttttgccggaatctttgcgtgagaacaaaggtcacaatgtgttctatggcttaccattattattaggattactcggtatctattggcaatggacacgtggaaaaaaaggcaagcagcaattcagtgtcttatttttccttttctttatgacgggattggctattgtgctctatctgaatcagactcccggacaaccccgtgaacgggattatgcgtatgcaggttcgttttatgcgttcgctatctggattggaatgggagccgccggatgctgtgacatgcttcgcaggaaacaggcaaaaatcctcccagtcggcttacttatgctgctttgcctgtttgtccccatacaaatggcaagccagacttgggatgaccacgatcgaagcaaccggtatacctgtcgtgactttggtgctaattatctgatgacacttcccgacaaaggaaatccgatcatattctgtgagggggataatgatacgttccccttgtggtataatcaggatacggaagaagtacgcagagatgtacgtatctgcaatttaagttatgcgcagaccgactggtacatttatcagcaacaatgtcctctgtacgatgctcccggactgccgatcagttgggatcaaaatcaataccaggaagggaagaacgaatatgtggctgttcgtccggaattgaagaaacagatagaagcattgtatcagaaacatcccgaagaagcccgtgatagttttggaaatgatccgtatgaaataaagaatatcctgaaatattgggtgttcgcagagaaacaggaattccatgtgatacctaccgatactataaatatttatattgataaggatgcagtactccgttctggaatgatgttgcctgaagccattcgtcatttaaaaggggaagaactaagagatgcaataccggataaactgtctatttctctaaaaaatatacgtctgttgactaaagtggacttactcatgctcgagatcctggctaactgtaactgggaacgtcccctgtacatggcaatctcggtaggcaactccagtaaactgaaatttgatgactactttgttcaggaagggttagcattccggtttactcctttcaactataaagaatggggagacgtggaagaaggcaatggatatgccatagatacggagaagctctacgagaatgtgatgaacagatataaatacggtggattggatactcccggactttatctggacgaaacaaccctgcgcatctgttattctcatcgaaggctctttgcgcaactggctaaagaattggtgaaacaaggagacgacatccgtgccagaaaagtattggaatatgctgggcaagctattccggcatataatgttcctgaagtatacgagagtggttcgtatgatatagccaccgcttatgcttccataggagaaacgcagaaagcgaccgatctattgaatcatctgatagcagaatcggaaaattatatcgactgggctttctcattgggagataaccggatagggatggttcaacaggattgtttgtataggttctggcaatggaatcagtgtaatgaattactgaagagtatggataaagagagatatgaacagagtaatcagcaatttgaaaagaaatatatgcgctttactcaactaatgaattatcacaactaaactcaaagaatatgaaatcgaaaagaataagagaagaagaaataaaaacagtattgggcaaaagaaattacgtcatcttaattatcggctctatattgattatcataggatatatattaatgagcggcgaggggagtacccttgccgcctataatcccgatatatttagtggaacacgcatacgtattgccccattattgtgtttattggggtatctactgaatgtattcggtattctttaccgtcctcgtcaaaggggatttaatctttcaatagaggtaactgattgagcatatttctaagtttgattgccactcgtggcataggttcggcaactgtaagtcctaccagatcatattcggaggatatatcattaatgatacgaactacttcttcaatcttcatgccgttaggctcaacgcctacggcagcgattatctctgccgggtccaatacatccatatcgaaatgtataaccaccttcgaaaccccggtacttttcagccattccataatctttgtacgatcattggcaacttcctgtggagataatcctttaattcccagctttctttgtcgttcctgcataccctcatcccatgagcggagtccgacaatcagggctttggaagcatccgtttttcccggaagtaattccattatttcttcatctcccattcccaaacaagctgttagtgccattgcatgataacccttatattcatcataaggcagattgatgtcgggatgtgcgtctatccagacgatagctacatcatccgggtatctattgattaaataagtaaacggaacaacactaacggaacattctcctcctaaagtgacaatccgatccggatgattctctttaagcagatcaagcgcagctttagtttgtttcagtatgacactgcgtgcactgatacctttttccgtcgctctgtcatttatatccagtgaaaccggaacttcgaccgtattctgaccggtctgtggggctaaatagttcaataactgtgctcccagatagtagcctctggatgaatcttccgccggaatatcaggcatccaatgatctacaattcctccttgccattgaggatagataaaacgaagagttgattttttattttccatatttacattgtttgttactttttcttgtgcattcattgaaacgactccaacgactaatgcaagtgataataaatactttctcatctttttgaagcaaaagtagggaatacctgaaacatcggcaagtagggacgaattattcatatactgataaatttagccctatactacatttggggattattatttttgtttttgtagtgatatccttatttttgcagaaaagcagaaaactatgtataagaagaaaattccttttgatattgattgtgggataaagattacgatggaagtgatcgggggaaaatggaaaagttgcatcattcaggaattatgcactggtccgaaacgtcccagcgagctgcatcgtttatttaccgaggcaagtccccgggtcatcaatcaacaactgaaagaattggagatgcacggcattatcagcaaaaagatattcatggagcttcctccccattcggaatatgctatcaccgaattgggaaagacgctgattcctctgattgagcaactggaaatctggggtgatagctttcgtccggagatgaagagaatcttgaaaatagaataaatctttctaatatcattaatatttcaaaaaagaccatctatctaaaataaattattgcttcttttgtcctaatgaaatgaaaattgggagatagtatgaataacaacattgatataaaaacgctggaggcctttcaggatgggaatcacaaggcctttgagactatttttatagcatactacaacaaaaccaaaacattcattgacggatatataaaatcagaacctgatgcggaagagctgacagaggatttatttgtcaatctttggatcaaccgtcattcgattgatacgtccagatcattcaattcttatttgcacaccattgcaagaaatgcagcaatcaactttctgaaacataaatatgtgtgtgatgcctatctgaacaataatcaagaaacaggatatagctctacttccgaagaagaccttattgccaaggaattggaaatgctgattgacgaacttgtcggaggaatgcccgaacaacggagaatgatttatacattgagtcgtaacgaaggattatccaatgccgaaattgccgaacgcctgaatactaccaaaagaaatgttgaaagccagctaagtcttgctttgaaagaaatacggaaggttatttcatgtttcctggtatcactattatagcattatattttttttcattctgctttataaaaaaaacttccactttcttattgagctttttgccactaaactgtatatatagtaaagtgcagcaaaaatgaagaaaagtaatatcagtaaaatcatcaaaatgttcctctccgcacgctttccatccgaaacggaagagaaagtgcagaagtggatcattaaagaccaaaatcagcaggcgaaagcaaaagcttcattggattattggaatgaattggacgtagaagccgattcgagcacttatgtctcattggaacgggtaaacttaagaacaggatataataaggagcatctgaccaacgtagcttcttatcagaagtttgcccgtgttgccgccgttattgttcctttgtttttattggcaggaggaatgttctactatctttctccccgaaacgaaatgatagaggtatctgttgcctatggagaacagaagcgtctaatcttgccggacagttcggaagtatggttgaatgcgggaagttccattttatacccggagacttttgccaaagataaacgtcaggtcattctcaacggtgaagcttatttctctgtcaaaaaagatactgcaagtccttttattgtagaaacctcccaactctctgtgaaagttcttggaaccaggttcaatgtgaaagcctatcctaatgatgagaaaataacgactacattgactagcggtaaagtggaagtgagtgtccggtctcaacctccccatatactaaagcccgatgagcagcttacatacgacaaaaaatcatcagatattcacatatcagtgatagatacgaatgatacaaattgttggatggcgggaaaactagtatttaccaatgccagcgccggagaaatattccgaaccttggaaaggcactataacaccactattgataatacagcaattatccccgcatccaaacgatatacggttaaatttctgaaagatgaaagtctgaatgaaatactaaatatattgaaagatatcatcggctttgattatcagcaatatgaaaagaaaatagtattaacccgacaataaaaagaaacagcctatgaataaaaagaaccgggaagcagcttgagaccctcctcccagttctgaaatgtctaccctcattcaacaagtgacgtaaaatgaagtatcaacatacaaatatagaataatgaatcgaataaatacaaataaacaggcaggtaagctcgccatttttttattttttacttttctatctcttacaactattgcacagaataaagataaaaagattaccatacaaaataaaaatatctcattaaaagaggcttttgcacaaattgaaacacaaaccggatatagcatcgcttatgaacaatcgaacctgaatatcgaaaagaagcactctttatcattcaaaaatgtaaccattgacaaagctatggctcaactattgaaggaaaccggatatgtatataagataaaaggatatcatattataatttctttgcaggatatcaaacaaaagactactagcaatgatacacaaaaactgactcaaaccataagaggaatcgttgttgattccaaaaccaatacacccatagaatatgcctctgtctgtataatagaagatccctcacggggaggttcgactgacggacggggaaatttccggattaataatatcccggtgggtcgttataatattcaggcatcttttatggggtatcgcccaagtatcatcagcgaagtatctgtcacttcattcaaagaagtatttgtagagattcctatggatgagaatgtacaagatttggctgaagtacttgtcaagccggaaataaaaaaagaccggactatcaacccaatggctatcacaggaggacgtatgattagtattgaagaagcgtcccgatttgccaatggttttgacgatcctgcacggttaagttctgcatttgcaggtgtagcaggagatgtcggtactaatgcggttgccatccggggaaatgccccgcaatttacacaatggagactggagggaattgaaatacctaatcctactcactttgctgatttatcaggcttgggaggaggatttctgtccgctttgagtacgcaagtcatcggcaactccgatttctacaacggagctttcccggcggaatacagcaatgccttatcaggagttttcgatatgcatctgcgaaatggtaataatcagaagtacgaacacgcttttcaagtcgggctcatggggatagatttggcctcggaaggacctatcaataaaaagcggggaagttcctacctgattaattaccgcttttctactacttcactggcatcgggtaatgacatcaacctgaaatatcaggatttagccttcaaactaaattttcccacacgtaaagctggaaccttttcgatctggggattaggattgatagacagaaataaagcagatgttttggaacgttccgaatgggaaacgatgggagaccggtcgtcgggatataataaactggaaaaactggcaggtggcttagcgcacaaatatgtactggatgaaaatacttatatccgttcttctctatccgctacctattccaaagaccgttcattggcggacttacataccgacgacgctattattaatgtagcagatattcagaatagcagatggaatttagtattcaattcatatctgaataagaaattcagtccgaggcataccaacagaacagggattaccattacggaacttaaatatgatcttgattacaaagtcagctcttatttgggattaaacaaacctatggaacaaatatcgaaaggcagtggagaaagtacagtcctctcggcatatagtagttccgtaataaacttgagcaacaatctgacaaccagtttaggggttaccggacaatattttactttaaacaagaactggtcgatagaaccgagagttgcccttaaatggaaaataaatcctgcacattctttagcagcagcttacggcttgcatagccgccgggaaaggctcgactattactttgttgaacagataatcaatggtaaaaaagaatcaaaccggtacctggacttctcaaaggcacatcatttcggattcacttatgactggaatatcaatcagagcctacatctgaaaatagaaccctattatcaatacttgttccacataccggttgaggaaaactcctccttttcgattatcaattatgaagaattctatttagaccgcatattgacaaacaccggaatagccaaaaactatggaatagatataacactggaacaatacatgaaaaacggcttctactatatgattacagcttcattattcaaatcgaaatataggggaggagaccgtatctggcgaaatacgagactggataaaagttttttagtgaacctgctcgccggaaaagaatggatggttggcagactcaaacagaatgtattaagtgtaaacggccgtctgttctttcagggaggaggacgctatacacctgtggatgaagaaaaaagtcaggaagaaaaagacatcgtttttgacgagagcaaagcatatactaaacgattcaatccatctataaacggtgatgtttcgatcagcttccggatcaataagaaaagagtatcccacgagttttctctgaaaatactgaatgtgggtatgcgcaccggaatgcatttctatcaatacaatgaaagaacgagtgtagtagaagaaaaagacggagcgggtctgattccgaacatcagctacaaaatttatttctaaataactgaacaagaaaagggtttgttcacacaatagactgacacccaacaggcaactgctttcagtaattatggtataacaatctgtaatatatatactaacaagctctctgaatacctgtatatttgctgcgtgaaataatttagttatgaattatatgcgtatcatattcaagaaattcaaagcacgtatgattgtaggatgtatattagctgtaatagcattgctggcggtgtcagtcattgtttttatcaatcaagccagtttcggcagaactccccgtggggaacggctggaaagagtcatgaaatctcctaattacagaaacggagaatttaaaaatcagcatgaaactctattgatgacttccgacaggggacgttttagcggaatctgggagttcattttcagaaagatagacggtttgcgccccgaacaggctgtcaaagcaataaaaacagatttacgcaagattggccgtaatgaagaaatattggtatggttcggacattcatcttacctgattcaaacgggaggaaagcgaatattggttgacccggtattttgtatggcttctcccgtatcttttgtcaacaagccattcaaaggtacggaactttatacaccggatgatatgccggacattgattatctcgtgattagtcacgatcattgggatcatttggattacaacacagtcaaaaaattaaaagaccggattggagcagtgatttgtccgttgggtgttggcgaacatttcgaatattggggatttgataaagagcgtctgatagaacttgactggaatgaagacgcaaacctcgctccgggctttatgatacattgtttgcctgcccgtcatttctccggtcgcagacttactgccaaccagtcactttgggcttctttcctgctagaagctccttcacaaaagatatacattggcggagacggaggatatgatacgcattatgcagaaataggcaaccggttccccggcatcgacctcgcaattcttgaaaacgggcaatacaacgaagagtggagcttaattcatctgatgccccaatatatggcacagacggccagagatttaaaagcgaaaagagttctgaccgtacatcattctaaatatgcgttggccaaacatcgttgggatgaacctctcaaaaatgcagaagagatgaagaataaagattctctgaatgtattgattccggagattggagaggtcgtggcattagaaaaatagtgctttacccaatcggctaaaggttttcccgtctgttatcagtgaaattggtaaaacattctgtaatttgtatagttgaaaaacaaatttccctgattaactttgcaaagttgaaatatagatggttcaatcctgacagttttagacatttagatataactactataaattgaaaattaattagtttatgctacgtactatcagacttacaaccgccattgtgtgctttacacttattaccctgctctttctcgacttcacgggtacattgcacacatggttcggatggttggcgaaaattcaatttctgccggctttattagccttgaacataggtgtcgtattgtttttagttgtacttacattcctgttcggacgtatctactgctctgttatttgtccgttgggagtgtttcaggacattgtttcgtgggtatccggcaaacaaaagaaaaaccggttccgttattcaccagcaatgaaatggttgcggtatggcgttttaggagtattcattattatgatggttgcaggattgaactctttggctatcttgctggcaccgtatagtgcttatggccggatagcctccagtctttttgcaccggtctggcaatggggaaacaacctgttggcgtacttcgccgaacgaatggatagttatgctttttatgaggtagatgtatggataaagagtctttcgacgatgctgattgccattgttacccttgttgttcttttcattctggcgtggcgcaacggacgaacctattgtaatacgatctgccccgtaggtactgtattagggtttatatccaaatatgcgatattcaaaccggtaattgatacttccaaatgcaatagttgcggtttgtgtgcccgcaattgcaaagcatcgtgtattaatccgaaagctcatgaaatagattatagccgttgtgtgacttgtatggattgcatcggaaagtgtaagcatggagccattacatacacaagacggaaacctaagaacgaaatagctacgagcgaagatacgaaagcaaagtctgtcactactgaacaggtagacaatgcccgtcgtagcttcctttcagcatcggccatttttgcaacaacttctgtactgaaagcacaagagaaaaaagtagacggaggattggctactatcgaagataaaaagattccccaaagagaaaaccctatctatcctcccggtgctttaagcgcacgcaatttcactcaacattgcacagcctgccaattatgtgtctctgtttgtcccaaccaggtattgcgcccatcggacaacctattgacattgatgcaaccggaaatatcatacgaacgtggatattgccgtcccgaatgtactaaatgttcggaagtttgtcctgccggtgctattcatctcaccagtcttgccgagaaatcagctattcagatcggacatgccgtatggattaaagagaactgtgtacctttgacagatggaatggaatgtggcaactgtgcccgccattgtccgacaggtgccatacagatggtagcttccgatcctgaaaaaacagattctccaaagattccggtagtaaatgtagaaaaatgtatcggttgtggggcgtgtgagaacctttgtccgtcccgtcctttcagcgccatttatgtgacaggacatcagatgcatagaattatttgatctaaatcagtataagattatggaagataaaaataagaaagatataaatagaagagattttattaagattgtaggtatcagtgcagccacatcgacaggtctgttatacggatgctcttcaaaggggactacttctgcaagtagcgcaacaggagaaggagaggcgcccaccgataaaatgacttaccgcacatctccaaccaccggtgaccgtgtttcacttttgggatatggttgtatgcgttggccgctcaaacctgctcccgatggtaatggtgaagttatcgaccaggatgccgtaaacggattggtagattatgcaatcgctcatggagtgaactatttcgatacatctccggcatatgtacaaggcttttccgaaaaggcaacaggtattgcattgagtcgccatccccgtgataaatattacatcgctaccaaattgtctaatttctctcctgatacgtggtctcgcgaagcctcactcaaaatgtaccacaaatcattcacggagctacaagtcgactacattgattatatgttgctccacggcatcggcatgggaggaatggaagcccttaaaggacgctacctggataacggaatacttgattttctggttaaagagcgtgaagccggacgcatccggaatctcggattttcttaccatggtgacattgaagtatatgattatctgctctcacgacacgatgaatttaaatgggattttgtacaaatacagctcaattatgtagactggaaacatgccaaagagaccaatactcgaaatacggatgcggaatatctctatggcgaactggccaaacgggggattcctgccatcattatggaaccacttttgggaggacgtctatccaaattgaacgataatctggtggcacggctcaaacaacgtcgtccggaaagcagtgtcgcttcctgggctttccgttttgccggttcattcccggatattctgactgtattaagcggcatgacttatatggagcatctgcaggataatcttcgcacttattctcctttggagccattgacagatgaagaaaaagaattcctcgaagaaacggcacaattaatgctgaaatatcctaccatcccttgcaacgactgcaaatactgtatgccatgtccgtatggactggatatacctgctgtattgttacattacaaccgttgtgtcaatgaaggtaatgtcgccagaagcggacaggatgaaaattatgcgaaagcccggcgcgcttttcttgtcggatatgaccgtagcgtgcccaaacttcgacaggcaagccattgcatcggttgtaatcagtgtgtggctcattgcccgcaaaatattgatattccgaaagaactgcaccggatcgaccagtttgtagaacaattgaaacaaggtactttataaaagaaacgatggaaaaattaatcaatctattacatacgggaggatactcctgtaccattgccaacggaggaaaaatccgcactttcactcaacgtggcgtagccgatctctatgatttgctaacacaggaaccggagtttcttaaaggagctttgattgctgataaagtggttggcaagggagctgccgccctgatgattctgggtggtataaaagaattatatacggatattatcagtaccaaggctttggagctattccggaaatcagatgtgaaagtcgattttgcgcaggaagttgcttttatctggaaccgtaaccatacaggaggatgtcctgtagagacaatgtgcagtgaagtggaatcagcagaagaaatattaccactgatccgcgattttctggaaaagatcagaaataagaagtaaaaagaagaaacttgaaacacgaaataaagtatgagaagaaatacagcttgtttattcctgttcggtagcttgctttccctctcgggaatgacacatactaaaaaggatagcatacaggccggaagaaattatatgattgatgaagtcgtagtcaccggaacacgtaatgaaaccgatgtgcgtcatcttccgatgaccatttccgtagtcggcaggcaacaaattgagaaaagatatgagccttctcttttgccgttgttaacggagcaggtaccgggattattcactaccagtcgtggcatcatgggatatggcgtatctaccggagctgcaggtggcatgagcttgcgtggtatcggtggtagtccgacagcgggattattggtactgattgacggtcatccccagtacatggggttgatgggacatccgatagcggatgcttatcaatctatgatggcaaagaaagtggaagttttacgtggtcctgcatctgtactttatggttcgaatgccatgggtggtgtgattaatattgttacccgtcggcaacaggaagaaggtgtgaagacgaatatgcaagttgggtacggttcatataacacgttgcagactgaattttccaaccgtgtcaagaagggacgtttcagtagcgtcgtaaccggatcatataatcgtacagatggacatcgtcccgatatgggattcgagcaatatggtggatacgcaaagttaggttatgatatcagttctttctggaaagtatggggagatgtgaatgtaacccattttaatgcttccaatccggggactatccaagtaccactgattgacaacgattctcgtatcactcgtggaatgacatcgttcgctttggaaaatcattatgaaaagacttcaggaggtttgagctttttctataactggggacggcataaaatcaatgatggctatcagataggaaaagaaccgcaaaaatcacatttcaactctaaagacaaaatgctgggtgtatcatggtatcagagtgccactttctttaccggtaatcgtttgaccgtaggatttgattatcaacacttcggaggtgaatcatggaacaaagtactggctacgggtgaacatactccgggagtagacaagcaaatggatgagtttgccggatacgttgatttccgtcaggatatcagcagttggttctcactggacgcaggtattcgtgtagaccaccattcacacgtaggtacagaatggattccacaaggcggactggcttttcatttacccaagaatgcagaacttaaagcaatggtcagcaaaggataccgtaatccaaccattcgtgagatgtatatgtttcctcctgccaacccggaattgaaaccggaaaaactaatcaactatgaactttcctattcacaacgtctgctggaaggggcattgtcctacggaatcagcctttactatatcaatggcgacaatctgattatgtcaaacggactctttcctccattgaatatcaattccggagagatagagaattggggagttgaaacgaatataggctaccacatcaattcacactggaatgtgaacgccaattatagctggttgcacatggagaatcccgttcttgctgcccccgaacataaattgtatgcaggggcggactatacttccggacgttggagtatatcgactggagtacaatatgtgaaaggactttatacttctgttgtaaagggtagcgagcaacaggatcattttgttttatggaatcttcgtgggaattatcgtgtctgccgtttcgctaacctcttcataaaaggagagaacctgctggcacagcgttatgaaataaatgcaggttatcccatgcccaaagctacgtttatgggtggtattaatttgaacttttaaataataaaatgatatggaatcaactactgtaaaactctattcgctgaattacggcaatgtgagaacttatctggcagcctcgttattcatcgttggcaacatcctttttccccaattttttcatctcataccgcaaggaggaataacctggctgcctatctatttcttcacactgatcggagcttataagtacggatggaaagtcggtctgctgactgctgttctttcccctattatcaactcctcactttttggtatgccgatgccggtggtgctgcctgctattttattaaagtccgtattgctcgccattgctgccggttgggccgcacaacgtttcggacgtatctccatcccggtattggttggcgtagtacttacctatcaagttgtagggacattgggagagtggatgtatataggaaatttctacaatgccattcaggatttccgcattggaattcccggaatgtgcctgcaagtattcggaggttatttattcattagatatttgattcgcaaataacttccttatcaataaccgcttttccctgaaaagagttataagccttgaaaaagaaagttctcctctgttatagatacccataacagaggagaacttttttaaatacaacgtatctattcgctttttatttatcaatcttcttcgtcatcttccagttcagcagagggattgcctccttctttagcatacctgctcggactcatcttatagtattttttgaatacttcccgaaaatatttagtttcagagaatccaaccatgtctgaaatctcattaatagcatattcaccctctttcaataactcggtagcacgtttcaaacgcatcccccgaataaactctgtcggagactgtcccgtcaatgctttcaatttacaatagaaactggtacggctcatgccacttgattcacagagcacattaacggaaaattcagggttgtttatattctcatccacgattttctttacatttgatataaacttccaatcgaggctgttagtaccgtttgcagatggaaccattgatttcgcttctatatccagattggcatatctcatgcgcaacagttcccggtttgccaacagattagcgatattcgcccgtaatattttcacgctgaaaggtttgatgagatattcgtccgcaccaatcgacagtccatccagaatattattttcttctcccaaagcagtgagcaacaacacaggaatatgtgaaatttcaatatcacttttgatagccacacacaattcatctccccgcatctctggcatcatgatatcagaaagaaccagttccggccaatattctttgataataatcaatgcttcctttccgttagcgcaagcttgtacattatatatagaagacaatgaactgaccagataggagcgtagctcatcattgtcttctacaacaagaatccgtcgtaaatttggatcatctatcgtagcggttgtctttgccggtacattcggagcgggcagtacaggagccaacgcctcaaatttagaagatgcttcgtcactgatactttgagaagtcttattctttttcggaaaaacaattttgattgtcgtaccttgatgttcgacactatctacactaattttacctccatgaaggctcaccagttttcctaccaacattaatccgataccactacccgtcactttagagttaatagcattgctggcacggaaatgaagcttgaacaacttactttgttcactggcaggaagacctatacctgtatccttgattatcactttccatgaatcattcgtatcggacacggaaatgctgacctttccattttccggagtatattttagcgagttcgatattatattcttcaaaatagaatccatcttctccttatcaaacgatacattcatatagctgaaagtactctcgtatgtatattcaatacgcctaatggcagcataagaagagaatgaattatatatttcattcatataggtattcaactcatactcggaaacactcattttagaggaatatacatccgttcgctcaaaattaatcagattgctgaccagtcgtaaaagaacttccacattcctcaatgcaatgttcgtacgagttattccattgtcggtaagcgtctcttcttccaataattcctccaaaggtgcttttattaaagttaatggagtacgtatatcatgggccgtattgatgaagaactgcgttttttcatcagatatattcttttgttttcttagatttatcacacgtagaacaaaataaaatccccctattaccaacagaatataacacaagatagcccaccaactcgaccaaaaaggttgcgtgatgataattttcatagcacgttcctgaaaaacaatgtcatgttcttctctggatatagcacgtacatgaagaatatatctacctggaggcaaattggtaaaacgaatcaaattatttgctcccggttgagtccatttctcataaaagccttctaatttccacgaatatagtgcatttccgggagaatcataattgattgtagaaacttcaaatgaaaacgtattctcatcataagccagctctaatacatctgtctcatcgatacttttctgtaaaggagaatccttgacacccggataaacaggttgataagacagatgaaagtcgctaaataccaatctggagaacttataatccgggaatttcacattcatcggaagttcaattgctccatccgtactaccgaatacaaagtttttatttttacgcaccgttcctgccgctgcgttaaagtatgcaggcaacaagccttctcctctagtccaattacgaaatatcttttctttagtatgaaaacaggttattccgttctctgtactcatcattatacgtccatctacttccggcaatattgtaaatattctatttgaaactaaagcagaattatcagaaaaataatgttcgaaagtcttatcttgaggattatagataaatactcccataccatttgtcccgatatataacaacccattatctgcctgataaagcgtattaatataagtgattcctatctccatttcaatatactgatattcaccagtatttcgattcaataaatacaagccagcagcagttccgatccacatattatctttgtctttttcaacaattgatgttatggaattcagtcccggatatagacgtgcactgttagtctccaaatcaaaacattttagattataatagcctcccgaccagatatgtcctcttgaatctttaactatatcacgaatatatttatccggacgcatattgacgtgagaaagaaggtaaggagagaagtattcaactgatagcgtttctttatttattttataaatgccggaagtatatcctcctgcccatataatgccaggagccacttcacataaagtaataaatatatgattcttgtcctttagttgatgattaaaagagcttagaaatgaatgccactgacctgtttttgaattataaagactaataccattactagttccaaaccacagatcaccttcatgatcttcgataaccgcttgtacctgatcattgattaatgactgtgcattacccatagcatgtttcatccaatgataattttcatagcgattatcaatcactgtaattcctgttggataattagcaagccatatccgcttttcttcatctacaaaaacatcattgatattatttccattcatttcattataactctgataattagcaataatgtaatcttccagttcacaggtatttacgttaactttatacacccccattccttccgttgcaatcagtaactctgtttcattcaatgggctgatacgagctatgtttacatcactaagatcagcgtccggacgtataatttcctgtgtattcatatcgtacacaaaaactcctctttcaaatgaaccaatgaacaatctttttaattgccgatgaaaatacagttcactcacctgtgcatgaaaatagtccagtgtttcaacaggcatggtctctaaaataccattctccagtttgacatatcgtacgcccgtctccgttgctataaagaaatggtgctcatctacttgttctattgccgtaatactactatgcaatacattgggaaatcgaactatatgagcatctttaatattatacagcaatacagtatctttacgacatatccagatattatcattgcgatccagataaccacaacttattgcttcagaggtatccggtaatttatataccattttgaaatcgtctctgtcggcttcgtattgaaagactcgtccttgtttgccaaccacccatataccgatatgtggttctgtatataaccatcccaaacgtatgggagcatccaaaatagtgccttctttatttaatttatagtgttttatatctttaccgttgtatcggtccatcccttcatttgtaagaaaccacatatagccctgagcatctttctgaatattgaatatccggcgattgctcaagccatcttctattcctatatatttgtatgtttgtgctgtaacccaaacaggaaaaaagagaagaatatatacaatgtatttcatataaatagttgttttttaaactacttctaacgatcatataaacataacagttaacgaaactagacaaaaacaatgacaaatgcaaagaaataggagagattctacaagaaaacatctatttagaaacatttttatttccaaagttgattatttactttgcgaagttgatttatctgaaagtgttcttttgctatatgttataattagcgcatgttttgtttttgttaatttaactaatcagatttgattccagtttcttcttatagacccatatacttattgtaaaataaataagtgcctgtatccagagagttatatattccggtctgatatcagccatactggctcccatagaattcagtttcacaaaagcgagtgtgcctggtgcagctgggaaaatgtaatggactactttccaataccagggcattagttccattggataggaaacgccggaaagaaagattaatcctacggagaagaaggcgatcatgagtaggggagcttcagaatccgtaaaatacctggatgcagccaatcccaagaaagaagttgccatcaaatatggaatcaataatagtacgatgtacaatccgtttccaatattggggatgctgaaaaagtgagggagcaagcctaatagaaaaaaggcaaagatggcataaagagtacagtatacggacgtttttcctgccactatacgaatagcaactccccagccataccccaaaggagtatatgcacggattcctttactactgtattcttctccggtcaccataccaataaccatcagcaaggtctggaaaattataatcatcatgactgccggaataagataggaaccatatccttcggtataattgtagagtgcagtgccttccacattgatcggtttcgccatagctacggcgagcaatccttgtggtggaagaaacactgcttcatctggccggtatttatcattaatagccagcatgacacgtgaagaagcaccttgcaaagcttcgaaatacaagaaggcatcagtagttgcataaagggaaaatacggcttcatctccccggaacacccgttcctcaaaatcatgaggcaggtagagtattccctgtactttgccttctttcatccattcttttgcttcgtgatagtccatagcctgactaaaaatctctgcttggggagtagcatccagccaacggataaaatcacggctcaattcactgtgcgaattgtcgactacggcaacaggtacatcggttacaatattcggtgcatacatataattgtagagcaacccgtaaacgaagattcctcccatcaacaccagtaaaaccgcataactggtactgatagctagaaattcacgacgaatgatgaatgacaactgttgtaacttacttaatgttttcatacttatgactttctatagctcgttttaaatgaggaagcagcgacagggccagcaacgggaagatacagagtatcacagccgacggccaaagatggataaacccaccgcctccatagagcatggtttgcatcatttccgtaaaatgacggacagggaacaaattggaagcatccctcaccaacggatacatattgggaaccggaaaggttactccggacaaagtagcccccagagaacctaccatagaaactacacttataaccaacgatattgccggaaacagcgagaataaaaacagccctaaagcctgtgttgcaatgatgaaaagcacagtcatgatattcattaaccaccaactcccctgaaaaggaatatgcaaaataccaaacatgacgtaattagccaaccatcctatcagtatatatataatggtataaggtaataatttacctaaaacagctgtcactatattgccttttgcagtcgccagccaatcatctgctgtgcggaacttgatttcaatgccaaccgcatacacggtaatcaacagaatcaaaacctgaaacagcacaaagaaaaagggctgacttaaatataccgaataatccagactagggttatatatcggatggttattagcttgtacgggtaataaaaaggtggtaatctgatcctgttctactccgagtgccatcgcttgcatcaccacaggagaaagagccaccggagctaaggaagtttcgaatgccgccatcaactcaccacctaccgacattaatgcataatgataatagtaggagagtgttgcattctttccggtaatcgcattctgttcaaattggggaggtatggaaagatatccataaatctctttcttttgcacagattcacgggcagctgcttcatttacaaaatgctttgtcactttaaaagttggtacggcagaaatattcctgactatcgtccgggaagtagcagtattatcctgatcgacaataccaataggaatgttttccatctgtccgttaccaaagatcgtagccataaagaaaagggtgaacaatggcaagacaatgcagacaccaaaataaaggcgccgtgaagtcattcgccgccactctctgagcagtacggaacgaaaaggggaatatgtttgtgattcatccattctctggtttatttgatgtcgattaatctaaagtcaataacacggacatgccgggacgcaagtcatccaccttttgggttggacgggcatgaatctcaaaggtacgtaagtcataacttccggtttgcttggttgatttccaggtagcaaaactgcctagcggactaatataatagattttgaattcaatattttttttaccgatagcgggcacatccgcaacaaatgtttcgtccattttaaattgcggcatcagatcttcccgcacgttaagaacaacatgtatatcatccatcaccaccaaattcataatgggagttcccggtgcaaccaactctccacgtttagggaagattgttgctatctgaccgttttccggagcggtcaaccgagcatcgaccagcaaagccgagacttcatccactgtgcttcgagcagcatccaccatgctggcagcagacgctttatcttctttttgtgcaccatctacagccatctgatactgttcataggcagcacgttcggctgctacagccgctttatacatagcttctacttcatcctttctttgagaagtaatgacactgtccttatataaagtaagaatacggttgtaagttgtctgggcgagagtaagatcgctcttcgttttattccataattgcagtgcagtagccacgatctgacgacgggttccggcatctattttcttgttctgttgtactgccacctgttccaaggcattcacttgttgatacttggcatgtacttcagggctattaatgacgacaagagtatctccccggtgtacccagtctccctcctgaacgaagaaagtgtcgatacggccgggaagtttcccactgatacggatttctgttgcttcagcttgtccttgcaagaccagcggctgtttatgcattaatataactcccaagccggtgaaaataccgacagccagaagaatgatgacaaaagcccatgatagggttttactagttggtttcattgtttgttacggtttaggttgatagtttgcaaattgttccggtgtgccacaaagcgagagtagattcattagtgccacatcatattcataatatgctgccaggcgagccacttttacactggcaagcatggtttcagcatcaataacttcggtagaagttgccatcccttctgtaaatgatttctttcggatgcgtaccaattcttcacttaaagcaatcgttgcatttaaagcttttacattatcctgtgccttttccagctgcgtataaagcttatctaccccaacagccagatcatcacgggccttcatctggcctaaagccagagtttgttccgttaattttgattgccgcactcttttttcacgatccagtccgtcaaagaggttccatgtaaaaccaatgcctaccatggtacgcggtaataaattactctgaataccatgcgaatacaaggtctgttttccaaaaagggctatattcggcaaatagccgctttgagcaatccgcacttcttgtttggcaatatgctgctgcagctgtaattggttgagtgtatagttcccactgtttactgaaagatcaaatagcattttaggtggcaatgaatcattcataaaaaggggagaggtaggaatgatattggcatctgcatcctttttattcagcaaaacctttaaggcactttgcactactgtttcttcttttcgcgcagcttccaatgcacgtttggcttcatccatatttacctgggcaaaaagccttcctgctttgtcaatcattcctgctgcctctaacttcaaggcattttcataatgtttcttcaatccgttgtaggtttcttcacgaaccgtcacaatttgttgtgccagtcgaagcccgtaatagctttcaaccaataaactttgctgattggccgatacctgtgcccgactttcccgtgccagatcaaccatcgttcttccgatgttggtggcatgaaaacgcttaccaccggaaaagagtacccactcggctgataaatcaacagttgtcaaatttcttggagtcaaaggaaatataagggtatttgccccaatttgatccagtatagacgaaatgatctggtcatccggaataatggaatgtacaaagtctttagccggatcggtaaactgcgataaaggctgtttaacttcgatcttctccgacatgtgtacaaacgcacctgtagactgaagactgggataccaaaaagcattcaacttatcacgttcagccttcgcaatctcaatactcttatccgctattttcagactctgatttccttgattcaacagatgcagtgattcttcgaaacttaatggtatctgtgcatctatctgaccgatggaaaaatacaaagtcaatagtatacaaagtcgcttattttttttcatactggttaggttatatctgaatttgagatattctaacagatgaaaagagaggtttgttcatcagaaagaatatagcaatacaacaaaagaaggtttcaacgcttttttataagatgttctatttttcatcttctctttgaatcacgtttgtatcatttctatcagatagaaaaaatgatgcataaaataatgcaagtatatgcaataagcgtgttattaatggatataaactacttgattatacaaaatataaatgcatattggagttgtttctttaaaggaaaagctctgttcctttaaatggaaccaaccgttggtcggtgagaagcgtgttctccctttaaaagaaagctaccaaacagcccataaagtaccagtttgtctctaaatcttatttattttgctagaaactaaatctgtcaatttgaaataatataagcaactttgttctcacatattcaatattcattctctatttagaacctagtgatagattattcactaaaatagtttatatctgaatcttattaaccggaaatcctggaattttttctatagcgactatcgccaatctgtatatttttaattatacgggctactaatatgcgttttttcatatccggttgtttttcatcaaaacaaaagaattgaagaggctttaatttctcttttttcttgcattaaaatttctgcgattttatttgagatataaaaattatgtttacctttgcatcaccatttcataaggcttttgagtcgagaaatgcagtaaatatgcggtaatagctcagttggtagagcactagcttcccaagctgggggtcgcgagttcgagcctcgtttaccgctcttttgaaaatcaggtggttatcttaaaaaaaactgcctgattttttatttttcaagcccccttttctatggttttatctattatcggacgaaacctaaactgaacatattgtagaataaccctaattgaataaccaatatggctaaggaaatagagaaatatctccccgtagattacagtgacagtttttccatagaagttacagaaaatcgtttgtctcctaaagatattattttaaaagtctttgctcataaccccgcttggctccgaatgttgtatgcaataagggcctgtttagtcaaacctttcggtatagaaactaaagctattgaaagtgaagaacttattatagaggaagacaagcaagaagcaattatgagaaaagacgataaacatttattgttttatgtcgatattttcattacgccattggaaacaggaaaacaaatgattgaggttaccacattagtaaaataccataattgggtaggaaaggcttatttcttttgtataaaaccttttcatcgggtcatagtgcctttagttctcaaaaaagcgctatgctgaacaagcacagtcgcggatgcaactatataacgaatatgaaaaatgagatatgtaatatagaagtacatgactttagaaaattaatgcatgaagaatagggcagttcatgcatttttcgtatttttgcaccctgttttaacactcaagaaaactttaaatagaaaaatataatggcaaaagaactgaaagaccttaccaaacgtagtgaaaactactcacagtggtataacgatttggtggtaaaagctgatttggcagaacagtctgctgtgcgcggatgtatggtgattaagccttacggatacgctatctgggagaaaatgcaacgtcaattggacgacatgttcaaggaaacaggacacgtaaatgcatacttcccgctattaatcccgaaatcattcttaagccgcgaagcagaacacgtagaagggtttgcgaaagagtgtgccgtagtaacacattatcgtttgaagaatgcggaagacggttcaggagttgtagtagatcctgcagctaaattggaagaggaattgattatccgtccgacatcagaaacaatcatctggaatacttataagaactggattcagtcataccgtgacctgcctattctctgcaaccaatgggcgaatgttttccgttgggaaatgcgtacccgtcttttcctgcgtactgccgaattcctgtggcaagagggacataccgctcatgctacccgtgaagaagcagaggaagaagcaatcagaatgttgaatgtatatggtgaatttgcagaaaaatatatggctgttcccgttgtaaagggagtgaaatcagccaatgaacgttttgcaggtgcacttgacacttacacaatagaagccatgatgcaggacggaaaagcattgcaaagtggtacttcccacttcctgggacaaaactttgcaaaggcattcgatgttcagttcgttaacaaggaaaacaagttggagtatgtttgggctacttcatggggtgtttctactcgtttgatgggtgcattgattatgactcactcggatgacaacggattggtattacctccacatttggctccgattcaggtagtaatcgttcctatctataagaatgacgaacaactgaaacaaattgacgctaaagtagaaggcattgtagctaagttgaaagcattgggtatctctgtgaaatatgataatgcagataacaaacgcccgggcttcaaattcgctgattatgaattgaagggtgtacctgttcgtttggttatgggtggtcgcgatcttgaaaacaacactatggaagtgatgcgccgtgatacactggaaaaagaaacggttacttgtgaaggcattgaaacatacgttcagaatttgcttgaagaaatgcaagctaatatctacaagaaagcattggactaccgtaactccaagattacaacagtagacacctatgacgaatttaaagaaaaaatcgaagaaggcggatttattctggctcattgggatggaactactgaaaccgaagaaaaaattaaggaagaaactaaagcaaccattcgttgtattccgttcgagtcatttgttccgggagacaaagaacctggtaaatgtatggtaacaggtaaaccatctgcttgccgcgtgatatttgcacgttcttattaaacaaaattcgcacataattataaaaaggatggaaacggctcaatcgctttcatccttttctttttttccttccatattatattatttatggcctgtcctaacagttcattagacattcaatagttatttcaagctcttttttcaatccatttcagttttatttcagaaatatcccttttctttgtagtatgtaaaaaagaaaggagacaaaattatgaagatattgattgtagaagacgaaccctctttgagagaactgattcaatgttcacttgaaaaagaacgttacgttgtagaaacagccagtgacttcaattctgctctacgcaaaattgaagattacgactatgattgtatcttattggacatcatgctaccggacggaagcggacttgatcttcttgaacgactgaaagctctccataagcgggagaacgtgattattatttccgcgaaagactctctggaagacaaagttttgggattagaactgggagcggacgattatttgccaaagccatttcatttggttgaactaaatgcacgaattaaaagcgtgattcgtcgccatcagcatgatggagagattgatatccgccaaggcaacgtacggatagaaccggataaatatcgtgtatttgtcaacgagcaggaagtggaactaaatagaaaagaatatgatatcctgttatattttatcaatcgccctgggagattaatcaataaaaacactttggccgaatcagtgtggggagaccatatcgatcaggtcgataattttgacttcatatatgcacaaatcaagaatcttcgcaaaaagctcaaggattcgggtgcaactattgaaattaaagcagtctatggatttgggtataaaatgatagtagaataaaaaggaaagagattattgtccatgaaattaatatattacatcattcttcgtattacccttgctctgactctcatactgacggtctgggctatcttcttttatgttacgatgatcgatgaagtcaacgatgaagtggatgatgctttggaagattattcggaaaccatcattatccgggcattggcaggagaggagctaccttctaaaaccaatggctccaacaatcaatattatatgatggaagtaagcaaagagtatgcggaaagccgggaggatattcagtataaagactctatggtatacattgaagaaaaaggagagaccgagccggcacgtattcttactactatctttaaagatgatgaaggacgataccacgaactgacagtatcgacccccagcattgaaaaagatgatttgagagatgccatccaaatgtggattatatttctatatgtagctttattattctgcattattatcatttccgtatgggtattttaccggaatatgcgaccgctctatgtacttctacactggctggacggttatcaaacaggaaaaagaaataaacctttgagtaacgatactcaaatcacggaattccggaaattaaatgaggctgccattcgttatgtggaacgtacggagcagatgttcgaacaacaaaaacagtttatcggaaatgcttcacacgagatacaaactccacttgctatctgccgtaatcgattggaaatgttgatggaagatgattcgctatcagaaaaacaactggaagaactgatgaaaacgcatcagactttagaatacattactaaattaaacaaatccctattattgctttccaagattgataatggtcagtttacggataccaaagaattggaactcaatgtacttctcaaacaatatctgcaagattacgaagaagtttatgattatcgcaacatagaagtcacgatagatgaacaaggcgttttcaaggtgacaatgaacgaatccctggctgttgctttgctcactaacctcctgaaaaatgcatttgtacataatattgatggaggacatatccgaatcaccgttactaagaacggtattactttccgaaattcgggagtggaacatccgctgaacaaggaacatatcttcgaacgtttctatcagggtagcaaaaaagaaggatctacagggctgggattagctatagccgattccatctgtcgtttgcaacatctgaatataaaatattacttcgagcagaatgaacattgcttcgagatttcccaatcataagattcatctgaaaaacacagaggacacggattttaagtgaacgacctgtcggttatcataaaaccaatttgtcaggtatatccattcacctgtttctccgtgtcctctgcgtcttttatagtgagcaggttatcgggatcgtatttctctcctcataaacatgatataagaaatagcgaagcaaataaccgttgccgcaatcaatccggtcaactgtggccatacaactaaaagactttgtcccaatgggagcggactagggatagctccctgtacctgttccatagtcaatggccccaaacttctgacagaaggcatcaatagtgtggtggtagcttcattaaacagttcactcggtgccaaacgcatcaaccctagaataaacttctgataactgataatctgataaggtgatgccatctgtgacggactcaacccttttgccaccaaattaacaatcatggtatagaatacactaaaaaacagccaaacagccacagatgctaaggcagaagtcgctgcctgacggaaacggagtgagaacagaatagccagattcaaccagaatgctacataaaagatactggtaatgatgaagaaaacaattctccaaaactcttctgccgtaggaggaataccaatagcaatcagcccacatcccatcaccagaaagcccaatacaaacaacatgatacctatcacaatcaaagcagccacaaacttcgcattgataatgcaatcgcgatgaataggctgggacagcatacggctcaatgttcctttattttgttcggaattgactgcatcaaatcccaaagcgattcccaataggggacctaagaagttaataaacagcacaaaagaggggagagtcccatctgaaaccgtaaacaacttcaagaaaagaaacgaaccgtccggatcattaggtttgatggcttcactaatattggtgagtgctgtatatagcgaccccatacaggtaagtgctataatacctattagtataataaaacgccaacttttgacatgatcggaaatttccttgttgacgataacccaaaaaggatgattgactttattcatgtctttctcctccttcctcaaaataatggttataaatatcagacaattcctgcttcttatctttcaattctgccatatcaatcaaagcaagtaattggccattactgaacaaacctacccggtcgcacactttctgtacctgatccagatgatgggaagagaaaagcactgtcagtccttcttctttactcaaccagcgaatcagttcgataaattcctgaacacctgcagggtcaatccctgaagtcggctcatcgagaataataatctccggatttttaataagtacatcagccaatcccaaccgctgtctcataccacgagagtatttccctgtctttttggctaactgatcttcaaggcctacccgcttcatcagttccatagccttggtttttgcctctttatcagaaataccatttaatcgcgctgtatagatcaaattctccggtcctgtcatatcatcatagaatcctacatcttctggcaaatacccaattttcctttttacttcaatggggtgtgtagtagaattgattccacaaatttcaactgttcccgaagtaggctctgtcaatcccaacatcattaagatagtagttgattttccagcaccattcggtcccagtaatccgaagatttctcctttccggatattcaggcgaatatgatctacagcagtgaaattaccgtattgtttggtcaaatcggtaagtacgatcacttgttcgcccataatttacctccttccatatttacggaacagatagtaaaccacgccgatggtggcaataatgataagaacgcctacccatccccatatcatcggagtttttactgcaactctgaactgcgcatctgcatttacttcaggagtttttgccatgatggtagtcacatagtcgcctggcaatgcttttttagaagctttcaaagtagccataaccgttgatgtctctccggcttttagtgcatcgatttttgaaggttcgaaagttacttcccagtcagcaggtttattagcagacagctgaatatctttcagtaatgaagaacctgtatttctgacttccagttctattttctttatatcacctgctgtgacatctgtgctcaataacccacggggagtagtcagttccatttgataagagccggtaacaaccacttccagttccaattcagcggaagtggtacctgtagcggcgcgtaccggaattttgtaactgccggcttctacattggcaggaggagtaatatctatacttacattttgggtactgttggcttccacttgtgcagaagtggcttgcttataattaggtttaaaaactacattccaacctctgggtgcattagccatcaaagcatatagctgctggtcggcagtctgattctttaaagtggcgctgaaagtgaaggttgatttggaatttccctgcatgttgggttggtcggtagtaaattcagtctggtatgttcctttttgagcaaccaccacatccaatggaagtttggcgtttccggcatatactacaaagtgataattacctttattcacttttaatgggacttcgacttttaaattgaaagtctttttctctttgggaagtaccgatagttggctaaggctccagccaccggatttcatttcgtgtttccaactggcggacaatccgctgacagaaagattcgcattcatcaactggtctgtgttgttgataagatcgatactgtagtcaattgacgctccgggagatacggagatttttgtgtaaggtgtgtacagaatcacgctcttaggtattgaatcattggcgtgcgtgtaactcatagggataatccccaatagaatagctaataataaaaaataatttgttctcatagtcatacaaaagttcttatggttgtttaatatgaatattgtcaaatttgtgtgtgcaaaaataaacgatgtatctattagtagttttaaaagaatcctaaagaatctaatttcaggaagaaattatagtgacactatccctataggatggtgacggtatcctttatatatagtgacgctatgttaaccggatagcgtcactatattttttcgattttttttcggaaattctcaaaattcccaaatcttttcagattctcctctcatctttgcattatcaaattaataataatagtaaaaaccaatattaaaaaacaacgattatgaaaaagttagtattcttattagtgtgtcttttcactttgcaaacagtagctcgtgcagatgacgacaaaccaatccaggtaactcaaatgccacaaccggcacagcagtttatcaaacagcattttgccgacagcaaagtagcattagccaaaatggaaagtgatttcttctataaaagttatgaagtgattttcacgaatggcgataaagtagagtttgacaacaaaggtaactgggaagaagtgaactgcaaatatagttctgtacctacagcaattattccggcagctattcagaaatacgtagcgaccaattaccctgatgctaaaattctaaaaattgagagagataagaaagattatgaagtaaaactgtccaaccgtacggaactgaagtttgacctgaaatttaatttgattgatattgatttctaaacctatttaaattgaacaaagatgaaactaaagatttatacacttttactggcactaagcgtcacatggagtctgcaaagttgtgacaacgatgacgatggttcaatagctgttcctgccgaacttcaaagtgcattttcatccaaattccctaatgctgcaaatgtgaagtgggaaactaagtctggatattatgtagcagatttctatgacggatatgaagcatctgcatggttcacccaagatggtaaatggcaaatgacagaaacggacattccttacaatgcattaccacaagcagtaaaaatgtcttttgagaacagcgaatatgcctcatggaagcgggatgatatagacaaactggaacggacaggcgttgaaactgttttcgtaattgaagtcgaaaagcagaatcaggaggtcgatttgtattattctgctgatggaactctgattaaaagcattgtagacactgatgatgataacaacgaacatcttcctgtacaattgactgaagctatgaaaaacttcatcaatgaaaagtatccgaatgcaagaatcatggaagtagacgttgaggatgatagaaatgattgggattctggatatacagaggtagatatcattcataatggaatccccaaagatgtattgttcaaccagactggaaattggtattctacttcatgggaaatacgtcagaatgaattgcctgaagcagtaaacaatactctcaataatcaatatggagaatatcgttttgacgaagcggagtatattgaaaaagcagatggtagcatatattatcgaattgaacttgagaagggggatgtagataaagtagtaaacataggcgagaacggtactgtcctttcataggtcaaagtgcataattctgaaacataattctcacaaacaacaaacgatgacataattcctgggggatatgtcatcgtttattattttttactgctcctgtacacgttttcttttcactgccgatttagcagttttatcagtgatgctgtccgtttgttgcggtttcaccttttcagcttcttcccgtttccgcttattgcgtaaccgccatttattccagaaatatagatcactccatttattgaaatcctttttatacatgatacctacaccttgtgtagtcaagtttgtttttgtgtaataacggtcatttgtctcattataagccttcaaacgaatatctcccgaacgggtaatcagccattctgcttcaaagtctcctacaaagttagtattagccatcggattatcccgataaccgaagtttccgtttatcaataaacggttattcaataattgtcccgacaaaataccttctacttccatgtctgtccaacccttatcacccgtactcaaattcgtaccgatattccagttattcgtttcaaagacctgtgaaagtgcattgttcaactggccggagagagtagatgagagcaccgatgacatcacattcgaattctgattattattacgggcatcttccgtatagaacttgccaatacccagcaaataaagaatctgcatattcatttgctcttccgtactgatataattacgtaccaatgtttgtatttcatctctttcattcggaagctcaatacccagtttgatagtcggtcgtaccagcataccacttagattcatgatacaatttacacgcacattgggttgttgtataatagccgaagcatccggtatcaaatcattcaaagaggcagagttcactgtatatgaagcttgtatgtccatgttagcatccaaaggtgcaccattgaacgttattgtacttccatctttgataataaagtctttacgaatcacttcctgcaaactaaatttatatactccttgattgatccggtaattaccaaacattttcacatcgcccttattataaaattccgtccggatatttcccgtaccttttccgctgatataatctccggcaatagggtccataatgattcgcatggtggcatcgggagttgcatccacgagaatattcaaacggatatctgttttctgctcttcctcctcctgacgtttttgctgtatttgttcgtaatatgagattacttgaacagaatcctggatagtacgacgaggtgttttatccacgaatttgataaactgattgctagtagccgatgctacactaccattaatataggtaaaggtagtatttcgatttgtagtcatggccacatttacatcgagcccctgtatggcgtttccagagagcaatacattcccggtaccatataccgtaccatagaaaggcatatctgtcgattcttttgtgttcatcacaagcatattatttgcctgtatctcgaaacgatagtttaggttcttaaaatgctggaaatgcaaatatccattcattctccccgaatgcccttccatatcagagatatgtatattattgaatgtcaatccggtaggagccaaatgaatagtatcttttaccgcaaaatgtgtgtttaaaatatcaaaattcatggatgcatctgtcataaccgcaccatccaggttcaatcctttaaattttccatagaaatgtacttttcctgttcctcgccctttaatatcattggcaatagacttcatataatgttcgaggaatttcagattcaattcatttgcttcaatatttaaatcaagtccgctctcgggttttaatggataaataatacccgtgacacgcgacggagaaggagatatatcctgaatggatgcatccaaccggatacctctgttttcattatcccactcaccatatatatccagttcacccaaacgaccgtgattgagtgagaaattctttataaataaacgggtattcatgataggctttttaaacactccgcttgcataagccgttcctgttgcatcgccctcaaaatttacatcgtcggatatacttgcaatatcaaatacatatcccatatttatatcctttagatcaacctttacagtatctttaggattctcggaaagccggccgttaatacgtacatacctatcctgatgactaaaatagaaattattcacatccactcgtccggaatcgaccaccacctgcgaaggatgtatcttccagagagtatcatttaaaataacatcagtaggcttcacatccaccatcgctttcaacaatgacttttctccacttgtacgtagaaatttggcaacagctgctaatttcccgctatatgttgctgcagcattatttccccaatccaaagtcgtactgacattgtcatctttagcttgtgcatccagagatagattgactgcccctttctttttcaaattagtcagacgaacccgtgcatgaatatgatctgccggattctcgcacagaatcatacctgactcaatatagttgttcttatattgcagacggggaaaatatccctctacacgcaagcgttgtaaagcatcattaaaatatcccttcaacgtagaatgagtatataccgttaacggtatatcaaatatcgtagataaaatgtccgtattatatatatgtatatcaaacaaaaagttattatgggtttcaatcggcttcttgggaggtaatatcaaagacggcacatatttccgcataatattcagaatactggcaggcaatgtgtgatattggaattttccctctatgcttgctttcaggaattcggaagtcaatctaagctgattttctccattttgtttggttgcccggatattcatattctgcatgaaatatgctttatccggagctgtaaattccaagctatccacattgatttctccaatcatctcatccactgatccacctgtaaaattggctttcagttttaaagagaactctgcatcaggatatttggtcgtaagattcaaatcatgtgggcgtactttattgactactgcaagaaaattaaaagtaggaactttggatgcaacatttacgtctccattcagataaatagagccattaggatcatccaacgcaatctttccattaaatccgccttgtttgtattctccgtccagtgtgatattttcatatctatatctgctataatctatcgaagcaatcagtcctttcaattctacggcaggcaagtggtcagcaatatgccggccatgtacatccagattgaaagtaatttctcccaattcctcattatccaataatttacctagttgaaaatcctctgttttgacagctccggaatacgcaaacaatccttttgtcttatcagaactcaattttaagtcggtctttacatttccaagactcgtttgtaattgtccataagtaactaagtccgtgaagtatcccgaaatttctccctggaaactcacgttgcccaaacgttcgagaagaggaggaactccattataattaggactcaaattacgcactaaaaaaccgactccgcgcgtattggccgaaagttcggaaagggttccatatacatacgcatcttgtggatgcgataagtcctgaagcgatacatctcctcgcagacggaactgacggtcatcggctgtaatctccagatgcgaacaagtcaactgatccacagttcccttcacctccatatccaacgtcaccggttccttgaaatgcgagaggatagggacaaaaggagaaatatcttttaaagtaacttgcgatggcaaagtacggaaagagaaatgcacctgttctgtaaaacggtcaaaagctttcaaactatcatactccaaatgaatggtatcgagcttgagagaggtttcgggcaattctattgtaaaattatcaatgtttgtctgcttgttattggcaaccagtttcaaactcatttttttcaaagagaagccggatgctttttcatcaaggctcaatcgcttgatccctaaattcaaagagtccttacttaatgccttcagcgatatattagcgatgatattttgaagctgaatatgcttagcattaaatttccccggtgtttcttcttccgacaacacatgataagacatccttccacgacgaatcaggatggaattaatacgcaaatcaagggagttttctttcttcacggtatctttggaagcaaaagcatccaaaacaaacttaaaattaggagggaaatccggagtctctttccggagattgatattaaatccgaaaagctggacactgctaatggatatctttcctttaaaaaagggcataatatcgaacttggcagacaagcgtgtgactttgagcatttcctgaccactctgatcgtcaagcaatacatcatcaataataatacggttcaatagacccatattaattctaccaatcactacctttgtatttaaaacttcagaaagttcttcagctacaaatacactcattgcttgctgaatgtttggtatattcagcaaaacaatagtcccgatatatactcccagtacaatacctactacccagcgtacagtctttttcagcgttctgatatgcgataacttttattttgcggacaaaaatataaaatagttcgttacgaatcgtagttttatgattacttttgcaccgtttaatagtttaaatacttatgagtgcaataattttaggaattgaatcctcctgtgacgatacgtcggcagccgtaatcaaggatggttatttgctgtcaaatgtggtatcaagtcaagccgtacatgaagcatacggtggagtagtacccgagttggcttcacgggcacaccaacaaaacatcgtaccggtagtacatgaagcattaaaacgtgccggcgtcaccaaagaagagttgagcgcggtagctttcactcgcggaccgggattgatggggtctttgcttgttggagtctcctttgcaaaaggattcgctcgttctttaaacatcccaatgattgatgttaatcatttgaccggacatgttttagctcattttattaaagcggaaggagaagaagagagacaacctgtttacccatttctctgtttgctggtatctggaggaaattcacaaatcatactggtcaaagcctataatgatatggagattcttggacagactattgacgatgccgcaggtgaagctattgataaatgctctaaagtgatgggacttggttatcccggcggaccgatcattgataaactggctcgtcagggaaatccgaaagcttttacattcagcaaaccgcatattcctggtttagattacagcttcagcggattgaaaacttcctttttatattcattacgcgactggttaaaggaagatcctgatttcatagaacaccataaagtagatcttgcagcatcattggaggctactgtagtggatattctgatggataaattacgaaaagccgccaaagaatataagattaatgaaatagctgtggccggaggagtttctgcaaataatggattgcgtaatgctttccgggaacatgccgagaaatatggctggaacatttttatccctaaattcagttatacgactgataatgcagccatgatcgccattaccggatatttcaaatatctggataaggacttttgttctattgatcttccggcttattctcgtgtgacgttataattgggtacaccttattatatataataggataaaaactaagaagtatgtttgccgaaataataaccattggcgacgaactgttgataggacaggttgtcgacactaattcagcctggatggggcaggaattaaataaaataggcattgaggttcttcgtattgtttcaatccgtgaccgggaaaaggaaattttggaagcgattgataatgcgatggaaagggtgaatattgttttagtaaccggaggactcggacctaccaaagacgatatcaccaaacaaactttatgcaaatactttcatacagaactggttttcagcgaagaagtattcgaaaatgtaaaacgggtactggcagggaaaataccaatgaatgcactcaacaaaagccaggcaatggttccgaaagattgtacagtgataaataatcctgtaggaagtgcttctgtcagctggttcgaaagagatggaaaggtacttgtttccatgccgggcgttccgcaagagatgactgccgtaatgacagaaagtgtattacctaagctgcacgagaggtttcaaacggatgtgattatgcatcaaacatttcttgtacaacactatccggaatccgtattggcagaaaaactggaaccgtgggagagtgctctgccagaatgtatcaaattggcatatttgcctaagctggggattattcgtcttagactgacaggacgcggacaaaacagggaagaagtaaaagttcttcttgaacgtgaaaaggtaaaattagagaaaatacttggtgaagacattttcggtgaagaagatacgccattggaagttatagtcggtgaacttttaaaaaagaagaaattgaccgtttccaccgcagaaagttgtaccggaggcagtattgccgcacgtttgacctccattgccggtagttctgaatattttaacggaagcgtagtagcctattctaatgaagtaaaaatgggacttttacacgtttcctccgaaacattggagcaacatggggctgtcagcgaagaaactgtgattgaaatggtaaaaggtgcgatgaaaacactaaaaaccgattgcgccgttgctacttcagggatagcaggtcctggagggggtactcccgagaagccggtgggaactgtttggatagccgctggttataaaaacgaaattcatacttacaaacaggaaacgaaccgcggaagaagcatgaatatcgaaagagcaggcaataatgcactactaatgctccgtgatttactcaaataaagaaaaataggtgcctggaagtgaattattttaggaaattcttgttttatacggataaaagtgcttactttgcgtcctgtttgaaagaagtatagatataaaactataaaaataagatagaaatgtcgaagatttgtcaaattaccggaaagaaagccatgattggcaacaatgtttcacactcaaagagaagaactaaaagaacctttgatttgaacttgtttaacaaaaagttctattatgtagaacaagattgttggatcagccttagcatttgtgctaacgggttgcgtattatcaacaaaaaaggactggatgctgcgctgactgaagcagtggctaaaggttattgtgattggaaaagcattaaagtaatcggctaaacgtagaggagaaaacttacaatggcaaagaaagcaaaaggtaacagagtacaagtgattctggaatgtacagaacacaaagacagtggaatgccgggaacatctcgttatatcacaactaagaacagaaagaatactacagaaagacttgagttgaaaaaatacaacccgattctgaagagagtaacagtacacaaggaaattaaataataaagtagtataacccatggcaaagaaaacagtagcaagtttgcacgaaggttctaaagaaggtcgtgcttataccaaggttatcaaaatggtaaaatctccgaaaactggagcatacgtttttgatgaacaaatggttccgaacgaaaaagtacaagactttttcaaaaaataatcgaaatagcatatacgctataactgcaaaatcctctcattggcgaacaatgaggggattttttattgcttctttttttacttttccaatcctttgttatatctttgtagcaaatgtattatacaaacaagtgtaaatatgggattttttagttttttttcaaaggagaagaaggaaactttagataaaggattatctaaaaccaaagagagcgtattcagtaaaatagctcgtgctgtggctggcaagtcaaaagtagacgatgaagtattagataatctggaagaagtgctgattacatctgacgtcggcgtagaaacaactttaaatattatcaagcgcatcgaaaaacgtgctgctgcagataagtatgtaaatactcaggaactgaatcttatattacgtgacgaaatagcagctctgcttactgaaaataattcgggtgatgtagctgatttcgacgtacccatcgcaagaaaaccttatgtcattatggttgtgggagtaaatggggtaggtaaaactacgaccattggtaaactggcttatcaattcaagaaagcaggtaaatccgtttacttgggagccgctgacactttccgcgctgcagctgtggaacagctaatgatttggggagaacgggtaggagttcccgtagttaaacagaaaatgggagcagatcccgcatctgtggcttatgacactcttagttcggccgttgccaataacgcagatgtggttattattgatacagccggtcgtctgcacaataaggtaggcttaatgaacgagttgaccaaaattaagaatgtgatgaaaaaggtagtgcctgatgcaccggatgaagttttattggtactggacggttccaccggacaaaatgcatttgagcaagccaaacaatttactttggcgacggaagttaccgctatggccatcactaagcttgatggaaccgctaaaggtggtgttgtgattggtatttccgatcaattcaagattcctgttaagtatatcggactaggcgaaggcatggaagacctgcaggtattccgtaaaaatgaattcgttgattccttgtttggagaaaatgcatgaaaagaaaaacaatagatattattactttaggatgttctaaaaatctggttgactccgagcagctaatgcgccaattggaggaagtcggatacagcgtaactcatgacactgaaaatccgcaaggagaaattgcggtaatcaatacatgtggtttcattggtgatgccaaagaagaatccataaatatgattctggagttcgctgaaagaaaggaagaaggggatttaaagaaacttttcgtgatgggttgtctttccgaacgctatctcaaggaattagctgttgagataccacaggtagataagttttatgggaagtttaattggaaggagcttttacaggacttgggaaaggtctatcacgatgaattatatatcgaacggacattgacaactccccagcattatgcttacctgaaaatttcagaaggatgtgatcgtaaatgttcttattgtgctatccctattattacaggacaccatatttccaaaccaatggaagaaattctggacgaagtacgatacttggtatcgcaaggcgtgaaagaatttcaggtgatcgcacaggaattgacttattacggcatagaccggtataagaaacaaatgcttccggaattgattgagcgtatttctgatatacccggggtggaatggattcgcttgcattatgcttatccagcacatttcccaacagatttattccgggttatgcgcgaacgtgacaatgtatgtaaatacatggacattgcccttcagcacatcagtgacaatatgttgaagttaatgcgccgacaagtgagcaaagaggatacttaccaattgatcgaacaattccgcagagaagtgccgggcattcacctgaggacgactttaatggtaggacatcccggagaaaccgaggaagacttcgaggatctcaaagaatttgtacgtaaagtacgttttgatcgaatgggtgctttcgcatattccgaagaagaagggacttatgctgcagaaacatacgaagattctattccacaagaggttaaacaagcccgacttgatgaattgatggatatccagcaaggtatttcggcagagttaagtgcagaaaagatcggtaaacagatgaaagttatcatcgatcgtctggaaggagattattatatcggacgaacagaatttgattcaccggaagtagatccggaagtattgattgatcgttcagagagagaacttaagatcggacagttgtatcaggtagaagtggtgaatgcggacgattttgatttatatgcaaagattataaatgactatgaataataaggaatttacatccgaactagcggaaagattgggatacacaatcaaggatacttccgaattgatgaattctttgttgtccagtatgacacaagaattggaagaaggtaatgtgattgcaattcaaggattcggttcttttgaagtgaaaaagaaagcggaacggatttcaatcaacccggcaagcaaacaacgcatgctggttccacctaaattggtattatcgtatagacctagtaatacattgaaagataagtttaaataaatatttcccgttatgaatgaaagactaacaattcaagaccttactgacttattggcagccaaacatagcatgaccaagaaagacgccgaagcgtttgttaaagagtttttcctcttgatagaacaagccttggagaacgaaaagactgtaaaaatcaaaggattgggaactttcaaacttattgatgtagatagccgggaaagtgtcaatgtcaacacaggcgagcgtttccagataaaaggacatacaaaagtctcattttctccggatgcaaatctaagggatacgataaataaaccttttgcacactttgagactgttgtattgaatgaaaatacaattctggaagatactccgatagaagagactgaggaagaagaaacaggagaggaagcgtcagcacaggcagtcttaaatgagatgggggatgactctgaaactactgtgatagaagaaaatgaaggtactgatgatggtctttcggaagaagagccgattcaggaagagcaaatagccagtcagccacttgcggaagagtccattgaagaacctgctattactgaggaatctgcaatagcacaggaatcgacagaacagacgtctcctaaagagcccgaagaagccattacagagactgatatcgaagaaaaggtagaacagctggaagatgaagaggttccggaagaggaagtgataatcaatgagcagcaagcagcatctatagaagaagaaaaagaagagatcactgccgaaaagattatagagcaagagcttctaaaagcaaatctgcaacctgtgactcctatagtgcctcctgctgaaaaagaaacgataaaaccggtccaaccggaacaagtatcccaaccggtttctaaaaagacagccccagtgaaggaaaaatctcctgtaccttatttaatagctgttattgtagtcgttttgttattatgcggaggtgtcattctttttatttattatccggatttattctcttcttcatctgacaagaatgcacttaatatgccgcctgtgacgactcaacccgttcaaccggaagcgcagctttctgatacgattgcacataaggatactacaaaggtaataacgcctgatgtatccaaagtcgctaccacgacacaaccggttgccaaaaaagaagaagctattcctgtcaaagcagaacctcaaacggttacacaacaacctgctacttctgcctatctggattcagcatcttataagattacgggaaccaagacaaaatatacaatcaaagaaggagaaactttgactagggtttccttgcgtttttatggtacaaaggcaatgtggccatacattgtgaaacacaatccgaaggttattaagaaccccaacaatgtaccgtatggcacaactattgaaataccagaacttacaaaagaataagtagttataatccattcacccgaccatgcaaatcctgtattggtcgggtgaagtgttatggatgtacaaaagcgtatgaaagtaccttaatctaaagatttcgcattgttttttaataaaaattagttgcaatcgttaattatatggcgtacttttggggcaaaataaaaagccttatgacacaggcaaggcttacataaaattaatgggatttaaataataaaatattaagtatttatggctgaatcaattgatatccgcgagctaaatgagcggattgaaagacaaagtgctttcgttaccaatcttacgacaggtatggaccaaatcattgttggtcagaaacatttggttgaatcactgcttatcggattactttccgatggacacgtcctcttggaaggtgtgcctggtttggcgaaaactttggctattaagacactcgcttctctgattgatgcgaaatatagccgtatccagtttacgccggacttattgcctgcagacgttatcggtacaatggtttacagtcagaaagatgaatcttttaaagtgcagcgcggacctattttcgcaaactttgtattagctgatgaaataaaccgtgctcctgcaaaagtacaaagtgctttgctggaagcaatgcaagaacgtcaggttactattggtaaagaaacattcatgttaccggaacctttccttgtattggcaactcagaaccctatcgaacaggaaggtacttatccgcttcctgaagcacaggttgaccgtttcatgctgaaagtagtcattgattatccgaagttggaagaagaaaaattgattattcgtcagaatatcaatggtgagaagttcaatgtgaaacctattctaagagcggatgaaattattgaagcacgtaaggttgttcgtcaagtctatctggatgagaagatcgagcgttatattgtagatatcgtatttgcaactcgtttcccagaaaaatatgacctcaaggaactgaaagatatgatcggattcggaggttcacctcgtgcgtctatcaatctggctttagctgctcgtacgtatgcattcatcaaacgtcgcggctacgttattccggaagatgtacgtgctgtagcacatgatgttcttcgtcaccgtatcggattgacatacgaagctgaagctaacaacatgacttcggacgaaatcatcagtaagattctgaataaggttgaagtaccctaatttgtagttataatacagtcaataagtagtcataaatatctatgcatgactacttaactacctactaattaactactgtataaatggaaacaagtgaaatactaaaaaaagttcgccaaattgaaataaagacacgaggattgtctaacaatatctttgcaggccagtatcattcggctttcaaaggtaggggtatgtcattttcggaagtccgtgaatatcaattcggtgatgatatacgtgacatagactggaatgtgactgcgcgcttcaataaaccttatgtgaaagtgtttgaagaagaacgtgaactgacagttatgttaatggttgatgtttccggaagtttggaatttggtacgatcaagcagttaaagaaagatatggtgacggaaatcgctgctactcttgctttctctgccatccagaataatgataaaataggtgtgattttcttttcagaccggatagagaagtttattcctcccaagaaaggacgtaaacatatcttgtatattatccgtgaattaattgatttccaaccggaaagccgtcgcacaaatattcgtcttgccttggaatatttgacaaacgtaatgaaaaggcgttgcactgcatttatcttatcagattttattgaccaggaaagctttaagaatgcgctgaccattgctaacaggaaacatgatgtagtagcattgcaagtatacgacaggagagtcagtgatcttcctccagtaggactgatgcgaatcaaagatgcagaaactgggcatgaacaatggattgacacttcttccaaagctgtacgccgggcacatcgcgactggtggatacaaaagcagactgaactgaacgatacttttaccaaaagtaacgtagatgctgtatccgtcagaaccgatcaggattacgtaaaggcattgttgaatttatttgccaaacgaaattaatggaatcaaagatgaatagaaatattattctgatagcattattaggtctattgtttgtcagtaaagcagtagcacagtctgttacagtagaagcaaaaattgattcactgcagatactgatcggcgaacaggcgaaagtgcaactgcaagtagccatggatgccaaacagcgtgctatttttcctgcttacactgatacactggtaagaggtgtggaaattatagaaacagtcaaaccagatacacaattcctgaatgatcgtcagcggatggtgattacgcaggagtacattatcacttcttttgactctgctctatattatctcccgccaatgccagttaccgtagatgggaaagtgtacaactccaaagctctcgcattaaaagtatattcaatgccggttgacaccttacatccggaccagttcttcggacaaaaatctgtgatgaaagctcctttcgcatgggaagactggtatggattgatcgcttgttcattcctggctttacctttgcttggcctgctgatctatctgattgttcgcatacgtgataataaaccgattatccgtaaaattaaagttgaacctaaattgccgccacatcaggctgcaatgaaagagatagaacgtatcaagacagagaaggtatggcagaaagggcaatcgaaggagtactataccgaacttaccgatgctattcgtacatatattaaggatcgtttcggatttaatgcattggaaatgacttcttctgaaataatcgatcagttactggaaatgaatgataaagaggccatatcagacctaaaactattgttccagactgctgatttagtgaagttcgccaagcataatcctcagatgaatgaaaacgatgccaatttgattaatgccattgattttatcaatgagaccaaacaaccggaagaggaaaatcagaaaccgcaaccaacggaaatcactattattgagaaacgttctttacgtgttaaagctatgctgatttgtggaattgcattgttatcagcagcattgatcggtacctttatatatataggtctacagttatacaatctttttgtataaaggatgtatagcttaatactaaatagtaaactgttaaatcataaataaaatggtttttgccaatattgaatatctgtttttgctattattgcttataccgtatattgtatggtatatcctgaagcaaaagaaaagtgaagcaactcttcaaatttcagatgcccgggtatatgcgcatacacctaaaagttataagaattatttgttgcatgttccatttctattacgctgccttgctttagtactagttattttggttcttgcacgcccgcaaactactaataagtggcagaacagtgagatagaaggaattgatattatgctggctatcgacgtttctaccagtatgctggctgaagacttgaagccgaacagactggaagctgctaaagacgtagctgcagagtttatcaatggacgtcccaatgataatatcggtattacattatttgcaggagaaactttcacccaatgtccgttgactgtagaccatgctgtattgttggatatgatacataatatcaaatgtggtcttatcactgacggtactgctgtcggtatgggtattgcaaatgctgtaacccgcttaaaagatagcaaagcgaaatccaaagttattatcctattgacggatggtacaaataacaagggagatatttcgcctatgacagcggcagaaatagcaaaaagctttggtattcgtgtatataccatcggagtaggtaccaatggaatggctccttatccttatccagtcggaaatacggtgcaatatgtaagtatgccggtagaaattgatgaaaagacattgacagagattgccggaacgacagatggtaactatttccgggctacgagcaactcgaagcttaaagaagtatatgaagaaattgataaactggaaaagacgaaactgaatgtaaaagagtatagtaagcgggacgaagaatatcattggtttgctttagcagctttcctctgtgtcttgttggaagtactattacgtaattcggtactcaagaaaattccataaggatgtttgtcaatcgttatttgccaatcataaaatagtaagaagatgtttcgatttggagaacctacatatttatatttattgttgctattaccttttttagcagctttctacttgtattccaattacaagaggagaaagaatatccgacgtttcggagatccgactttgttggctcagttaatgcctgacgtatccaaatatcgtccggatgtaaaattctggattatttttgttgctattggtttgttctccgtattactggcacgccctcaattcggttcaaaactggaaacggttaaacgcaagggagtagaggtaattattgctttggacatttcaaactctatgttagcgcaggatgtacagcctagccgtttagaaaaagcaaaaagattaatatccagattagtagatgagcttgataatgataaggtaggtatgattgtatttgccggtgacgcttttacacagctgccaattacaagtgactatatttccgctaagatgttcttagaatccattagtccttcgttgatttctaaacagggtacagctattggggaagcaatcaatctggcagctcgtagtttcactccgcaagaaggggtaggacgcgccattattgttattactgatggtgaaaatcatgaaggtggtgcagtggaagctgctaaagctgcggcagaaaagggtattcaggtaagtgtattgggagtaggtatgcctgatggtgctccaataccggtggaaggaacgaatgattaccgccgcgaccgggaaggtaatgtgatcgttacccgtttgaatgaagctatgtgtcaggaaattgcaaaagaaggaaaaggtatatatgtacgagtagataattctaattcagcccaaaaggccatcaatcaagaagtgaataaaatggcgaaatctgatgtagagtcgaaagtatatacagagtttaacgaacaattccaggctattgcatgggttattctactattgttattggcagaaatcctaattctggatcgcaaaaatcctttatttaagaacattcacctgttttctaataagaaatagttatacgtatgttaaaaagtaaatatattctattcgctgtatttctgttagcagcagctggtgtatcggctcagaaagcagaacgcgactatatccgtaagggaaaccgtctgtttaatgatagcgtatttgttgatgcagaggtgaactaccggaaggccttggaagctaatcccaagtctacggtatccatgtataatctgggaaataccctttcgcaacagcaaaagtttcaggatgccatggaacaatatgtatcggccagcaaaatagaaaaagataaaatgaaactcgcccatatttatcacaatatgggagtaattttccaggctggtaaagactatgccaaagctgtagatgcatataaaatgtcactgcgtaataatcctaccgatcatgaaacccggtacaatttggctcttgcacagaaaatgctgaaagaccaacaaaatcaacagaatcaagatcaaaatcaggaccaaaacaaagatcagcaaaagcaagatcagaaacaggaccagaataaagacaaacagaaggatcagaaacaagatgaaaagaaagatcagcagcaaccaccgaaatctgaaaagaaacaagataatcagatgtcaaaggaaaatgctgaacaattactgaattctgtcatgcaggacgagaaagatgtgcaggataaagtgaagaagcaacaaaaagttatgcaaggcggtcgcttggaaaaagattggtaatataaagttgatgatataaatttcataagcaatgaaaaaactgattattatattgatggcattgatagcatatagcactcatgtgtttgctgataaggtgtcttttactgcttctgctcctgatgcagtggtagtaggcgaacaattcaggctgtcgtatattgtaactacacaaaaagtgaaagattttcgggcaccatcaatcaaaggttttgatgtattgatgggtccaagccgatcacaacaaagtagtactcaaatagtgaatggtaatgttacatctactagcagtattacatttacatacatattaatggctaataatgccggagaatacacaatacccggtgcctccattattgccgatggtgaccaaatggtggcaaactcagtaaagattaaagtattgccacaagatcaaggtggcaatagcggacaaaataatagtagtagtggttctatacattcctcatctggtacaagtgtctctaatcaggacctttttattatggcaagtgccagtaaaacaaatgtgtatgaacaggaggcttttgtcctgacctataaaatatacaccagagaatccaacttacaacttaataatgcgaaattgcccgactttaaaggtttccattctcaagaaatagaaatgacaaccaatgcaagatggactccggagcattatcagggacgtaattactatacaacggtttatcgccagtttgttctcttcccgcaacaatcaggaaagctatatattgatccggcacagttccagatgactatcggaaaacctgtgcaatcagatgatccttttgatgccttcttcaatggaggaagtaatgtcattgaaattaaaaaaaatatttccactcctaagatagcaataaatgtcaatccgcttcctacgggtaaacctgcagatttttcaggtggagtgggagagttcaatatatcttcttctatcaacagtaaggaactgaaaaccaatgatgctattactattaaactggtaatatccggtacaggtaacctgaagttgatttctaatccggaaattaaattcccggatgattttgaagtatatgatcccaaagtagacaatcaagtcagattaacccgggaaggactcacaggcaataaagttattgaatatttagcaattccgagacatgccggaacatataagattccgggagtatctttcagctattttgatattcgctccaagtcttacaaaacactgaaaacagaagattatgtagtaaatgttgagaaaggtgcaggtaatgcggatcaagtaattgctaacttcacgaataaagaggacttgaaagtattaggtgaagacatccgttatatcaaacagaatgaagttactctccaacctaaaggaagtttcttctatggttcaatgacatattggttattctatatcattccggctcttgcctttattattttctttattatttatcgtaagcaagctgctgaaaatgcaaatgttgctaaaatgcgtacgaagaaagcaaataaagtggcaacgaagcgtatgaagcttgcaggaaaattactctccgaaaataaaaaagatgctttctacgatgaggtattaaaggcattgtggggatatataagtgacaaactgaatattccggtatctcgtttatctaaagataatattgaagagaaactaagaaatcacggagtaaatgaggaactaatcaaagaattcctgaatgcattgaatgattgtgaatttgcacggtttgctccaggtgatgagaatcaagctatggataaagtttattcttcttcaatagaagtaataagcaaaatggagaattcaataaaacattaacccagaagagattatgtcatgaaaaggatattattttttatattattatcaatgtcgcttacttgtttcggacaagattcgttaagcattgatactagacaaacgaatggagttgattctatccacgcttcgcataccacattttccagtaatacactggaagatgcaacaaaagctgaaggagattccgcatatataaaagaagattatgcagcagctattcagatatatgaagcattactgaaaaatggagaagctgccgacgtctattacaatctgggaaatagttattataaaataggggagatagcgaaagctgttttaaattatgagcgtgctctgctattacaaccaggaaatggtgacatccgtgctaatcttgaagtggcacgtgcaaaaacaatagataaggttgaacctgttcctgaagtattctttgtttcatggatcaaatctctgacaaatagtatgagtgtagatgcatgggccacatggggtattgtctcctttattctattgattatcgctttctatttctttatattctccaaacagattatgttaaagaaaataggattcatatcaggaatcattttgctgattgtcactgtttgctctaatctttttgcttcgcaacaaaaagagcatttggttaatcgaagtgaggcgatagtaatgaatccgagtgtaacagtacgaagtactccaagtgagagtgggactagcttgtttattctccatgaagggagaaaggtaagtgtcaaagacaactctatgaaagaatggaaagaaattcgactggaagatggaaaagtcgggtgggtacctgcttctgctatcgaggtgatataaaggtcattaatagattttatatattcaagaaaaaaagataagcaaataatttgttttatctttttttttgcttaagtttatagcgtgataaaaaaatcacatagtattaaccattaaatttatgagacatgagaacaataacgtttaatgaacttcgtaaaattaaagattcattgcctagcggtagcatgcatagaatagcagacgaacttggtttgcacgtagatacagtgcgaaacttcttcggaggacacaatttcaaggagggaaaaagcgtcggaatacatcttgagcccggtccagatggtgggcttgtaatgttggatgacacgaccgttcttgatcgggctttaaaaatcctagatgaattgaatatgagtatgcaaaaagaacaggctaccgaatctgtgcaagtttaaaatataacaaactgaatcccaattgaatcaaacaattgggatttcttatttgttttcaccttataaaatgtacatttatggaagacaaattagtaaccctggccattctgacatacaccaaagcgcagatcttaaagaatgtcttggaaaatgaaggtatagaaacctacattcataacgttaatcaaatacaaccggttgtttcatcgggagtgcgtttacgaattaaagaaagcgatctgccacgtgctttgaaaataacagaaagttctacatggctgtctgaaagtatagtgggagagaaggagcccaaagtaaaagataaatcaaataagattttaattcccgtcgacttctctaattattcgatgaaagcatgtgaatttgcattcaacctggcaaaaacagaaaatgcagaagtcatcctgttgcatgtctatttcacgcctatttatgcatcgtcgttgccttatggggatgttttcaattaccagattggagatgaagaatctgtaaaaacgattatccaaaaagtccattctgatctcaatgctttatcagagaagataaaagaaaaagttgcatcaggcgaatttcccaacgttaaatatagctgcatcttacgtgaaggtattccagaggaggaaatcttaagatatgctaaagaacagcgtcctatggttatcattatgggtacccgaggcaaaaatcagaaagacattgatttaattggcagtgtaaccgctgaagttattgacaggagtcgcacggctgtattggctattccggaaaatacaccatttaaacagtttagtgaagcaaaacggattgcctttattaccaattttgatcaaagagatctaattgctttcgaggcattctttaatacttggaaatcattccatttttctgtatctttgatacaccttacagattctaaagatacctggaatgaaataaaactagcaggtataaaagaatattttcacaagcaatatccggggcttgaaattcattatgacgtagtgatgaatgataatttattaaaaggacttgatcagtatatcaaagataatcatatagatataatcactttgacttcttacaaaaggaatatatttgctcgattatttaatccaagtattgccagaaaaatgattttccattcagatacaccattgcttgttattaacagctgatcaaatcaggcaaaaaatgagcatccaagattagggaataatacttattatgtttaatagaaaaaggagtaatataatgaccttactcctttttctatttttatttaaatgaagaaatttacctgttccactcaagtccatatcaaatataagatttttcaattactactttaaactattgaataaaaaaaagaagactactatttctaatagccttcttatattttttcagaaaacgatcttacttcatcatcttatcgatttcttcgaattcaggtcccatattcaagttatagtaaactctgtaaagaccttgcaaccataaatcttgttgatcgggttttaaagctctggctttttcatagaatggtttagcttcttcgtagaatttcttaaccacagcttgtgcttcagcgtacttaggatcattgatatctgttgttgctttatcagcataatcctgtgctttcatcaaatataccaaacctacattagagtatgcttctgcatattccggatcagcagcaatagcttttttgtagtattcgattgcattatcatattctttcatattatgataaagatatgcttttacatacaaatacaacttgttattcggatcattagctaacattctatcagcaaactccatagctttagaagcttgattagagctattataataatcaaccaaattagcgaagaaataatcatttccagggaacttaaggataccctcttccaaagacttaatccatgcagcagtatcacctttagctttataagcatcagccatcaattgcattgcaaatttacctccatctttatcggataaagccataggagcatatttaatgatcgcatctttatcacctactctatcagcagctaatgttgcataataagcaatttgcggaagaagagtatcgtttttagccaattctttatcagctaacatcggataagaagctgactctacataggttgcaaagaacttcaaagcctctttattcttgtccaggttgaaatactgaataccaccattaatcaaattaggacgttcagccaacatactggaagcattagccttccgatatttgtttttaacttttcccttttcattaggtatttccgctaattcatcacacttattatagtactcatacattttcagaatactattgtatactttcaatgtatcatacggtttcttcaaaaaagcatttttcatttgctcctcgttgatacgtctctgaataaatccagcaacgtcccatgtgtcagcaagatccttcgtttcaggattcttcatagcctccttaataagctgttcagcctgcttaaaattaggttttacgtcattagccatactctttgcttccttcacattcttcatctgagcgaatgagaagctaacagccatcaataaaaccatagaaaataatactcttttcatgattgttgtttgattaattattaatattatgtctattcctcaatttcgttattgctttcgttttcatttacgtccgctgcatcatcaatatcaggaacatcagcattcggatcactcacgattgtaccctctgcctcttctgccggaatttcatcttcaagactttctgtcataaccttacataccgaaccaatctggtcgttacgtttttcaagatttatcagacgaacgccttgagtagcacggcccattatacgaacatccgctaccttcaaacgaatagtgataccagacttattgataatcatcaagtcattttcatcggttaccgacttgattgttaccaacttacctgtcttttcggtaatattcatggtcttcacacccttacctccacggttcgttttacgatagtcttcaatttcagaacgtttaccatatccttgttcggaaactaccattacagattctgtctccaaatctttgatacaaatcattcctactacttcatcctgaccatcattatccaacgtaataccacgtacacctgttgctgtacgtcccattacacgaactgctgcctcatggaaacgaattgcacgaccattgcggtttgcaatgatgatttcattatttccattcgtcatacgaacttcaattacgctatcatcttcgcggatagttatagcatttacaccattctgacgaggacgagaatactgttcaagcaatgtcttctttattacacctttcttagtacagaataatacatagtggctattgataaactcggaatcctctaaactcttcacacgcaagtatgcagttacattatcatccgaatcaatattcaacaagttctgaatagcacggcccttagaattcttcgttccttcaggtatttcatatactttcagccaataacacttacctttttgtgtaaagaacatcatggtattgtgcatggtagcaggataaatatgctctacaaagtcttcatcacgggtttccgtacctttcgaacctactccaccacgattttgtgcacggaattcggtcaacggtgtacgtttaatataacccatatgagaaattgtaataatcatctgatcatctgcatagaagtcttccggattaaattcttctgaagaataaacaatttcagagcgacgtacatctccatatttcgctttgacttctaacaattcctctttcattacccgacgacatacttcatcatcagccagaatactttccaaataagctatctgcttcattatttcttcgtattccgcatgaagctgatcctgcatcagaccggttaactgacgcaaacgcatttctacaattgcacgagcctgaatttctgtcaggttaaatcgctcaatcaagcctgttattgcgtcattcggagtttttgcagcacgaatgatacgaattacttcatcaatattatctgaagcaataatcaaaccttcaagaatgtgcgcacgctctttcgccttacgaagatcgaactgagtacgacgaataacaacttcgtgtctatgctctatgaaatatttaattaaatctcttagattcaacgtttttggacgtccatgaaccaaagccacattgttaacaccaaaagaggtctgcaaagctgtcattttatagagtttattcaacactacacttgcatttgcatcacgttttatgtcaataacaatacgcataccatcacggtcagactcatcgttggcatttgagataccttctatcttcttatcatttacaagatcagcaatatatttaatcagttcggccttatttacattataaggaatctctgttattacgatcttgtcatgtgtttgtccgctttcaatttcagctttcgcacgcataattacacgtccgcgacctgtcaaatatgcttcgcgtacaccactcacaccatatatatatccgccagtagggaaatccggtgctttaacaaattccatcagttcctctaccgtaatttccggattatcaatatatgcatcacatgcttcaatcacttccgaaagattatgaggaggcatattggtagccataccaacagcaataccggatgctccgttcaccagaaggttcgggatacgcgtcggcatcaccttaggttccaccagcgtattatcaaagtttggctcaaaatcaacggtttccttatacaggtcatccatcattgcttcacccaacttattgagacgagcttctgtataacgcatagcagcagggctatcaccatccacagaaccaaagtttccctgtccatctaccaaaggataacgcattgcccattcctgcgccatacgtaccattgcaaaataaacagaagaatccccatgaggatgatacttaccaagtacctcacccacgattctcgctgactttttataaggtttgtctgaagtattgcctaattccatcattccgtataaaattctacggtgaacaggcttaaatccatctctaacatccggaagggcacgcgaaacgatgaccgacatggagtagtcaatgtacgatgacttcatttcctcctcgatgttaatctttataattctgtcttgttcaagcatttaaaatgattattaattatacattctacggtttgtgaaaaaccacgctaaagtactacttttccccgatatacgaaagtttttagaaagaaagttttatcatgaccgggacgataacccgccaaactttaaaatacaaaaataaaaagataaaaacgataaatataatatggaaagataaataacatcggtaaaaaagagcctattatttgttataccttatatatataatacaaatacactgtttttatggcacgccatttgtagatataagaaataaagcaaatattgcaatacaaacttgattaaatgcgtatatttgccagtgaataacccttagaagaaaaggaaaaagtatgaataatcaattctcacaaagagtttccgacattatcgtctatagtaaggaagaagcgaatcggttgagaagtaggtatataggtcccgaacacctgcttctgggaatactccgtgacggtgaaggaaaagctatcgagatattgtctaaactcaacaccaatctggctgctataaagcaacagattgaagctcagctgaaggcagaagctgatgaaatgttattgcctgatgcagaggtgccgttatctaatgatgcggcaaagatattaaaaatgtgtattttagaagctcgtggaatgaaaagtaacatcgctgatacagaacatgtattattggctattttaagagaaaaaaacaatatggcggcttccgtacttgaagcaaacgatataaactacgtgaaagtactggagcaagctacattgcagccggatatcaattccggcatgggcttttcggaagacgatgaggatgacgaagaaatgtcttctcctcgttccggcagaggtggctcggatgaacgccaacaggcacaaaccgcttccaagaagccgtctaatgatacgccggtacttgacaatttcggtactgacatgacaaaagcggcagaagaaggacggttggatcctgttgtgggcagagaaagagaaatcgaacgtttagcgcagatattaagtcgacgcaaaaagaataacccaattctgattggtgaacccggtgtaggaaaatcagcgattgttgaaggtcttgcattgagaatcattcagaaaaaggtttcgcgtatcctgtttgataaacgagtcgttgctcttgacatgactgctgttgtggcaggaacaaagtaccgtggacaatttgaagaacgtatccgttccattctcaatgaattgcagaagaatccgaatgttatattattcattgatgaaattcacacgattgtaggcgcaggctctgcggcaggctctatggatgccgccaatatgctaaagccagcattggcaagaggagaaatacaatgtatcggtgccaccactcttgatgaatatcgtaagaatattgagaaagatggcgcattggaacgtcgtttccaaaaagtaattgtagaaccgactactgctgccgaaactctgcagattttgcgtaatatcaaggataagtatgaagatcatcacaatgtgtattatacagatgaagcattggaagcatgtgtcaagctgacagaccgctatatcacagatcgtaatttccctgataaagccattgatgctttagatgaagccggctcacgtgtacatcttactaatgtcaatgtacccaaagagatagaagaacaggaaaagctgatcgaagaagctaaaaacaagaaaaatgaagccgtaaaatcgcagaattttgaacttgcagccagcttccgtgataaagagaaagaactttctatccaattggatgagatgaaaaaagaatgggaagccaatctaaaagaaaacaggcaaactgttgatgcagaagaaattgccaatgttatctcaatgatgtcaggcattccagtacaacgaatggcacaggccgaaggcatcaagctagcaggtatgaaagaagatttgcaagctaaagtcatcgcacaagacacagctatagaaaagctggtcaaagccattttgcgaagccgtgtaggactcaaagatcctaataagcccattggcacgtttatgttcttaggtccgacaggagttggtaaaactcacctagcaaaagagttggccaagtatatgttcggttctgccgatgcactgattcgtatcgatatgagtgaatatatggaaaagttcactgtttcacgcttggttggggcacctccgggatacgtaggatatgaagaaggtggccagctgacagaaaaagtgcgccgtaaaccatactctattgtattgcttgatgaaatagaaaaagcacatccggatgtattcaatatcctgcttcaggtaatggatgagggtcgtctgactgacagttatggcagaatggtagatttcaaaaataccgttattatcatgacttccaatatcggaacccgccaactgaaagaatttggacgtcgtgttggttttgcgacacaaagccgcctggatgataaagaattctcgcgaagtgttatacaaaaagctctaaataaatcattcgcgcctgaattcatcaatcgtgtagatgagattatcacgtttgatcaactttctctggaagcgataacaaagattatagacatagagctaaaaggattgtacgatagaatagaatctattggttacaagcttgttattgaagataaggcgaaagaattcatcgctagcaagggatatgacatacaatatggcgcccgtcctttgaagcgcgcaattcaaacctatctggaggatggtttatccgagctcatcatttcctcgtctttaaaagagggagatactattcaagtaacccttaatgaagaaaaaggcgaattggagatgaaagttgtttctccggaatagagttatttcctgaataagaaaataatttaatatgccataatgtcagaccttcgggtctggcattttttttgtctctgtatggacaaatatcaattaaaattaatcaatagataaactaaaaaaatatacgtattatgcaaaaaggtaatattggggttacaacagaaaacattttccctatcattaaaaagtttttgtacagtgaccatgaaatttttctgcgcgagttagtatccaatgcggtagatgccactcagaagctgaatacgcttgcttctattggcgaattcaaaggtgaactgggtgacttaactgttcacgttgaattaggcaaagatactattaccatttctgaccgtggtatcggtttgactgcagaagaaatagagaagtacatcaatcaaatagctttctctggagctaatgacttcctggagaagtataagaacgatgcaaatgccattatcggacatttcggacttggcttctactctgcctttatggttgcaaagaaagtggagattatcactaaatcatacagagacgatgcaaaagccgtaaaatggacttgtgatggcagccctgaattcactattgaagaaatagaaaaagccgaccgtggatcagatatcatcttatacattgatgacgactgcaaagaattcctcgaagaagcacgtatctccgaacttctgaagaaatattgcagcttccttcctgttcctattgcatttggaaaaaagaaagaatggaaagacggcaaacaggtagaaacggctgaagataatataatcaatgataccactcctttgtggacacgcaaacctagcgaactttcggatgaagattacaaatcattctatagcaagctatatccgatgtctgatgaaccactcttctggattcacctgaatgtggattatccattccatctgactggtattctctacttcccgaaggtaaagagcaatatagaattaaataagaacaagattcagttatattgcaatcaagtatatgtaacagactctgttgaaggcattgtaccagactttctgactttgttacatggagtaatagattctccggatattccgttgaacgtttcccgttcatacttgcaaagcgactcaaacgtgaagaagatttcaacttatatcaccaagaaagtttccgaccgtttacagtctatattcaagaatgatcgtaagcagtttgaagaaaagtggaacgacttgaaaatatttatcaattatggaatgctcacacaagaggatttctatgataaagcgcaaaaattcgcccttttcaccgatacaaatgacaaacattacacattcgaggaatatcagacccttattaaagataaccagacagacaaagatggaaatctaatctatctgtatgcaaataacaaggacgaacaatacagctatattgaggctgcaaccaataaaggctataatgtcttgctcatggatggccagttagatgtagctatggtaagtatgttggagcaaaagcttgagaaatcccgtttcacccgtgtagacagtgatgttgttgacaatctgattgtaaaagaagacaagaaaggtgaaactctggaagccaacaaacaagatgcaatcacaacagccttcaagagccaattgcctaaaatggataaggttgaattcaatgtgatgacgcaagcgttgggagaaaattcggctccggtcatgattactcaaagcgaatatatgcgtcgtatgaaagaaatggcaaatattcaagccggaatgagcttctacggcgaaatgcctgacatgttcaatctgatcctgaattcagaccacaagttgataaaacaagtattgaatgaagaagagaatgcctgtcaagcagaagtagctccgatactctccgaaatggataacgtcaacaaacaacgtaatgagttgaaagacaaacagaaggataaaaaggaagaagacatcccaacagctgaaaaagatgaattaaacgatctcgacaagaagtgggatgatctgaaaagcaagaaagaagctatctttatcggctatgcaagcaataacaaagttatccgccagcttatcgatctggccttacttcaaaacaatatgttaagaggtgaagctttgaataacttcgtaaaacgtagcattgagctgatttaatatcgcccctttaaacattacacatacttcaagaaagagcattcaacgttaaatacacgttgtaatgctctttttcaatttaaaacgatcggcaaaatatcgattaattgaaaagtattgtatatatttgaacacttaatagacaaaaaattcaattgtttgatttgggttatgagaaagatttttttagtgttcattactttatggctgattatcccggctatccatgcccaaaaagtaggacttgtattaagcggtggtggcgccaaaggaatgacgcacatcggcatcattcgcgcattggaagaaaacaacatccctattgactacattgctggtacttccatgggagccattatcggctccttgtatgccatgggatactctcctgatgacatggtagaactactcaaatcggaggactttaaacgatggtattccggagaagtggaagagaaatacgtatatcatttcaaaaagaatcttcccactcccgaatttttcaatattcgtttttcattcaaagattcactgaagagtttaaaacctcaattcctgcctaccagtgttgtcaacccgattcaaatgaatctcgtgtttgttgacctatatgcacgtgctacggccgcttgtaagggagattttgataaactttttgttcctttccgttgcattgcgtccgatgtgtacaataaaaaacagttagtcatgaaggaaggagatttaggagatgccgtcagagcttccatgagcttccctttcatgtttaaacccattgaaatagacaatgtactggcctacgatggaggtatctataataactttcccacggacgtcatgagagatgattttcatccggatgtcattataggaagcgttgtatccaccaatcccactaaacccaaggaaaatgacctcatgagtcaaattgagaatatggtgatgcagaaaaccgactattctattccggactctatggggattttaatgacattcaaatatgacaacgtcaacctgatggattttcaacgcatcgacgaattacatgatataggatataatcgaaccatcagcatgatggattctatcaaaagccgtatccatcggcgtgtgaatctggacaatattcgtttaaggagaatggtataccgtagtaatttcccggaactacgttttaaaaatatcatcattgatggagctaatccacaacaacaggcatatatgaagaaagaatttcataagtcggataacaaagaattcacctatgaagatttaaagcaaggttattttcgattgctatcagataaaatgatttcagaaatcataccgcatgcaatttataatccggaagatgacacctatgatctgcatttaaaagtcaaactggaaaacaactttgctgtacggctgggaggtaacatatccacctccaattcgaatcagatctacctgggacttagttatcaggacttaaactactatgccaaagagtttattcttgacgggcaacttggaaaggtatataacaacgtgcaatttatggcaaaaatagactttgccactgccattcctacctcgtatcgtcttataggttcgatcagtactttcgactattttaagaaggacaaacttttttcgcgaaataacaaaccggcctttaaccagaaagacgaacgtttcttgaaattacaggttggattacctttcctttcgagcaagcgagcagagtttggagtaggaattgcaagaatagaggataaatattttcaaaaaagtgtcattgacttcggaaatgacaaatttgataaaagccgctatgatttatttggtggatcaattagttttaatggaagtactcttaattccaaacaatatcctacacgtggatacagagaagcccttgtagcccagattttcgttggaaaagaacgattctatccgggcgaaggaagtacgaccagtaacaacaaagatcatcactcctggctgcaattatcttatatgaaagagaaatatcataatatgagtgaacattgggttttaggatggtatttgaaagccctgtatgcctccaaaaacttctccgagaactatacggccacaatgatgcaagctggagagttttctcctacattacatagcaaattgacttacaacgaagcctttcgtgccaatcaatttgtcggagccggcattcggcctatttaccgtttaagccagatgttccatcttcggggagaattttatggttttatgcctatttatccaatcgaaaaaaactcgttgaataaagcatattacggaaaagctttctccaagtttgaatatttaggagaaatttctgttgtatgtcaattgccttttggagatatctctgcatatgtaaatcattatagctcaccgaaaagggagtggaatgtcggactaagtataggtttacaactattcaattatcggttcatagaataattttctacaaaaaaagtcggtgaaaagcttgctaattcgggaaaagtccgtatctttgcacccgttaaaacaaaataacggtcgcgtagctcaactgaatagagtagctgactacggatcagccggttacaggtttgaatcctgtcgcgatcacttttttgaattaacagaatggccgcgtagctcaactgaatagagtagctgactacggatcagccggttacaggtttgaatcctgtcgcggtcactgaaaaatttacaagttatattatttgaggtcgcgtagctcaactgaatagagtagctgactacggatcagccggttacaggtttgaatcctgtcgcgatcacaaaatcctctgcatttgatgcggaggatttttattttctcccatttcatcgaagaaattagctataactaaactaaaaagattcaaaagtcagtcattataaacaagcgatacatcccctcatatcttttattttcaattccctcttcaccttcacctttcttccgggctccctataaataagtcgtttacgggtgaagggcaactcttacacagcctttttcacctgtttggaagtaagcgtctccgcgattctatatagtgtattaaaataaaaaggctaatgatccctttttagtcattagccttttcccatctgtcaggaagcagttccctgtatttttcaattggtgtgttcggttgccattcggctgttctgtttatcacatccgtgagatactcaaatagattcactttatgcatcctacaagtgagtgctatcgtatagagtatggcgcctcgttcggcccccttatggctgccgaagaacaatgagttttttcttgataaggatatgtaccggttcatccgttcaaccatattgttgtccagataagtgtcaccataattaaagatgtccaccactgcattccactcattgcgaagataggtaatggcttcctgcagttcgctcttaggtaataaatccccccgttcttctatttcatcaaacacatcttttatttctccgagtatgtccggcgcatatttttttcgatgcataagattctgttctaccgtccatccctcaaccccaactttatgcttatgctcgttttgataaagtgcgtttatcagctccacgatcctttttgcatccgggtccttctcaccgcaatctataaatttccgttttatatgttgcaagcacgggatgcgtgtgatattgggataagcatcgctttcgagcttccggtaaggtgagtaaccatcgctttgtatgatacctttgcaactgcctaattcgttaagaataactctttcagaccgggagccgtcatcatagagcaggtatatcatcctggtgtttatgccgacaaccacccaaaggtatcccttcctgactccttttcccttgctgttcttttccgggacgagtattttgtaataggtttcatcggctgccttataaggatcactcaaagctgtctgccggatgcacttataaagattttcgaagaggtttgaggctttctctatcaacttatgagccgtaggtttcttcagcgtaaagccatgactctcgaagtagttgatgattctttcaacaggtagcgattgtatataacgtaattccatcaatccggcaataaatgaaccgtcatagctggaattcaagaaggccgaagccggtgtttttccctcaaacaggcgaccttcttgcgtataggtgtgtatcttgtagacatgcttgatgaagcgcatgggtacacattcatagcggacgcatattctgggaacagtggtaaacaaccgggccttattgatgtcaaaatcgggatcatcgggataaacgacatgttcttcttcctccatctcataatgcatgtcacgtttggccccattgttctttcttgctttacgcttatctgctttttccgcttctatcttctgccgctcttcttcggatatggcagattggggagcctgttgctgttcggatgtgttggatacaagtttggcgagtcccttagtaaggcgctgttgcttgctaagagattcgcctttttgaaggagtgcctctttaagggaagaaacctcctttatcaaagcatctatttggtccaagagtctgttgttgtcatctcgtaatcccttgatttgttccttcaataactctatgatctcatcctttttcatggcataaagatataaaaaatcaacgaattagccaaataaaccggatgatatctttattgcaaatgtctaataatcagaatgttgaattagatcctaaaacgttttctcaaccgtacagactttaatgacactccatttaagataaaagacaaaacctgataagaaatctcgtaattgcctgtattggggttaaatgtcggtaactcaaaacttccaccttcgaggcgcttgtagtacagaagaaagccatcgccatcccaacgcagtatttttacactttgtcggtttttaccaaagaataaaaagatatctccggaaacgggagacaagtccttcatttccgatcgtataattttgaataaaccgtcaatgccaaggttcatacgaacaaagccctggtacagatagtatcgattggctgatgttagagaatacatggatctccctcctttctttcgtaatcgcgcaacattttaatcacaccaccgggtgtggcccgtttgactgaaatggtggttccactgttaaaggtgattgtgatcccggcaagactaaactcttcttccgacaacatggcgggtgctatttgagtgaatgaaggagaggaagttgtcggttgggagggttcaacgccgccataataatcacggaccacatctgccttggcttgtttaacgctatagccccgtctggacatccaggaactcataccaccaaaagtggtatgctgatcgcggcaaacatcggctaaagaacaattgtagtctactttcaatacttcaaggaaatgtttccaagtttttccaaatcgattttctgctaaatccataatgcttcatttttatacatagcaaaaatataagaatgaaaaaaggccgacaagatagaatcgcggagacgcttacttggaaatgaaatatgtcacaatggctattagaatttcttatcaagccctcaaatagctatgctttagataggctaaagcgtagctatccgttccctaaagctatgctttaggaaggtgaaaaacctgtatcgaaaaacgtaattaataagaaatataaccctttcacaatagacagcgactgtcttaaaataaatcatctaagtgtttattatgaattcctcgctgaagaaggcatcaacatttaatattcaactcattcaaaaccttgcgtattgcctcaaatgtggtaatgcgagtaggaactagtggcaaccgaagtttattctcgatcatacccatggcattcaacattgattttactcctgccggatttccatcaacaaacaataaattgaataattccgtgaatcgatggtgaatggttaatgcattggcaaagtctccttgaagcgccaggcgcgtcatacggctaaattcacgaggaaaagcattaccgattactgaaatcacaccaacggctcccaatgtaataagcggaaaggttataccatcatctccggagattacattgaaattttccggtttatttttaataatatcatccatttgcgtaatattgccggatgcttctttaatagcaactacattcttaaaatcgcgggcaatccgcaaagtagtttcagcagtcatatttacccccgtacgtcccggaacattatacaatacgatggggagctccgtagcttccgcaatcgctttataatgctgataaataccttcttgagaaggtttattataatacggcacaacagacaatatggcatcaactcctgtgaaatcatcatttttcaatgtttctacaatagcacgagtattattaccacctacacccaacagaataggaattcttccgttaacgcggtcaattaccatcttttttatagttttcttttcttcctcggtcagagtcggtgtttcagctgtagtccccagcacacacaaaaaatccgcattattctgtaatagatagtccaccatacgcatcaacgcgtcatagtcaacgctctcatcctctttgaaaggagtaatcagtgctacccccattcctttcaatttagtctgtatcatgagttttaattataatctctaatttatttagccgcaaaagtacgaatatttttcttatcttacgatataagtttcagaaattcgtcttcgcttaatatggttattccaagtttttttgctttttcaagctttgcaggtcccatattgtccccagccagtataaaacttgttttcgcagaaatgcttcctacatttttccctccgtttttctcgataagctctttatattcgtcacgtgaatgatgaacaaacacaccgctgataacgatagactgtcccgctaacttatccgtatatccgcttaaatcttcttcggtgcgataaagctgcagtccggcctcttttagcttggcaaccaactcacgattagactcattcgcaaaatatgcaagtatactctgggctattttttctccgatttcatcgatacttaccaatttttcaagatctgcctgttgcagatcatctatattctcaaacgattttgctatctttttggccacagtctcaccaacaaaacgaattcccaaagcaaaaataacacgctcgaaaggaacggttttgctttgtgcaatccccgttataatgttctccgccgatttttctcccatacgatccaaacctttgatatcatcagctgtgagtttatataagtcggccgtatttttaattaatcccaaacgatagaacatatccacggtttccggtcccaatccatcaatattcatagcctttcgactaataaaatgctcgattttgcctttgatttgaggaggacacgctgtttcattggggcaataatgagcggcctccccttcatacctgactaatttactaccacattcgggacaattgacgatgaatcgaaccttctccccaagcataaaactacgtgcatctttatctactcccgtaatcttaggaataatttcaccacctttttccacataaaccatgtctccgatatgcaaatcaagtccttcgatgatatccgcattatgtaaggatgcacgttttacgacagttcccgaaagctgtacagggtccagattagctaccggagtgactgctccggttcttcctacctgataggtcaccttattcaatcgggtcaatgcacgttctgcctggaatttataggcaatagcccatcgaggagacttagccgtaaaacccaaatttttctgttgtctcaaactgttcacctttaaaacaatcccgtctgtggcaaccggtagatttttacgttctacatcccaatagttgataaattcaaagacctcctccaatgtctggcacttacgcgtcaaatcagagattttaaagccccattttgccgcttcctgaagattttcataatgtccgtcacaaggcagattatctcccaataaataatataaataagcatccagcttgcgagaagctacaatagaagaattttgcaacttcaatgtaccggacgccgcatttcttggattggcaaaaagcggttcttcacgtgcctctttttcccgattcaactcttcaaacacttcccatggcataagaatttccccacgtatctcaaaagaagcaggataattatcaccatgtaatacaagcgggatagaacggattgttttcacattatccgtcacatcatcgcctttttctccatctccacgggtaacggcacgaaccaacttcccattttcataggtcaacgaaatagaagtaccgtcatatttcatttcacaacaaatctcgaaatcctcatttagcgctttacggacacgatcgtagaagtccgtcacttccgcttccgaatatgtatttgccaatgacagcataggatatttatgagccacttgcgtaaaattcttgttcaagtcgctccccacgcgcatagtgggtgaattttcatctttatattccggatgtgcttgttccagatcctgaagttcacgcatcttatcgtcaaactctttatccgagatttcaggagcattcaacacataataattataattatgccgatgaagttcggcacgcaattcctctattttttcttttatatccatatttcttcgattgtttaaggcaaaaatacatgtttatctttgaatatttgtacttttgcgaaaaattaaaagattatgcgcattgatattataacagttttacccgaaatgattgaaggtttcttcaattgttctatcatgaaacgagctcaagataaaggacttgcagaaatacacattcacaatttacgtgattacaccgaagataaatatcgtcgtgtcgatgattatccttttggaggatttgccggaatggtgatgaaaatagaacctatcgaacgctgcatcaatgctctaaaggcagaacgtgactacgatgaagttatcttcacgacccctgacggagaacaattcaaccaaccgatggccaacactctctctctggcacagaatctcattattctttgcggacactttaaaggcatcgattaccgtattcgcgaacatctgattactaaagaaatcagtatcggcgattatgtattaacaggaggagaactagcggcagcagtgatggcagatgctatcgtacgtatcattcccggagtcatctccgatgaacaatccgcactttccgattctttccaggataatttgctggcagcacctgtatatacacgacctgctgattataaaggctggaaagttcccgatattctattatccgggcatgaagcaaagatcaaagaatgggaactgcaacagtccctggaacgcaccagaaaacttcgtcccgacctattaggggagtaaaataaagtgtaaataaaaacgacgatgaagattacgtaaatcctcaccgtcgtttttattttatcttcaatctaaagattctgtccgtagacaattcctctaaacacgaacttctttttcatctgccactacctgcctgtttatcctttctttatttaaaagagaaatagcatttttcttgcagacttaatgcgaagggttattgtatgttttcaattacacctcaagcgcaccaattatttcctttacagacttacatccgtgtctttccaggtaattatttataccatcttccactttaatagtcacagcaggatctatgaaatttgccgtaccaatttggatggccgtcgcacctgcaagcatgaattcaacagcatctttccagtccataatacctcccaatccaatgacaggaatatttaccgccttggcaacttgccataccatacgtaatgcgataggttttacggctgctcccgacattccgcctgttatagttgacaaaatagggcgtttacgttccgcatcaatcgccatacccagcaatgtattgattaatgacacgctatccgcaccactttcttctgctgcacgagctatttcagtgatgtccgtaacgttcggggagagttttacgataagtgtctttttgtaagctgaacgcactgcttttactacttctgacgccccttttgctgacacaccaaaagccataccaccttgctttacattagggcaagagatgtttagctctatagcaggaattttgtcaagttcattaatgatttcagctgtttttacataatcttcgatggcagatcccgaaacgtttacaatcatattcgtttggatgtcttttatacggggatatatatgctccacaaagtaatcaacacccttattttgcagtcctacagcgtttaacatcccagaaggagtctctgccatacgcggataagggtttccttcacgtttgtgaagagtagttccttttacaataataccacctattcgcgctatatcaatgaagtcggagaactcttcaccatatccaaatgtaccagatgctgtcatcaccggggttttcatttgtaattcaccaatgtttacacttaaatctgccatagtagtttatttatattaaaaacaggaccttctttacatacacacaaatgaccttctgtcgtattttccacacaacataagcatgctccgataccacaagccattgtattttccaaagatacttcacattctatctgattacttttggcatattttgccacagccaccatcatcggtttgggaccacaagtgtaaatctgctcaaatcgtaccttatttaatatagaatgttgggtaacatatcctttttctccatggctaccatcttccgtggtggtatatacctctccatatttggcaaactcttccagctgcaacagatctttgtcgctacgggcacctaacaggaacgtaggtttatggccttttttagccaactgctcacctaaataaagcataggggctgttccgacacctccaccaactaataagagcttatcagaagcctccagaggcattgtatatgcatttcccagtggaagcactacatttattgtttcaccgggattaacctctgccaaacgtcttgttccatcaccaaccagctggatcagaaaccagacctcatttcgctgtttatctacaaaattaatagaaatgggacgccgtaagaatgtagtaggcgaaccgtccacccggagttcggcaaactgcccaggtaacatttcgggcagtaatgactgagaggtcaattttagcaatacatagtttgcattcaatctgatattctcggtcactgtcagatctaaaataaatttcttcatgtatggatataaaagtataaattcgtattccgggtgcaaagatacaggaaattgctcaaaccaccgattttactcttcatttttcaggtcgaaacgtctcataggtattatcatcgaaaaatattcttatttccgtgattttcctggcaggcttttctatatacctaatctcctgttttacaatctctttgggggcattttcggcgtttcttaacggcgtttccttgcgattttccggaagagtcggttctttggacggatttacgggattctcgtcgaataaagaaggcagataatcgtgattagaagaagaaaaggaagttccttcttcagacaccatcatttcgcccttaccataaagcaaccattcaagatttacatagtcatacttttgatgaaccttcataacgacctctaagctgggtttattccgatcatttaaaatatgagagagagtagattgttgcactccaattgtttcagcaaaaactctaggaggaactttttctctttccattatcattctgattctgtcttttatttccatactaccttctttttattacaattgtatgtgttatgtacctatttcacaaaaatacgcactatctcattgattatacaaaggtaaataattagattcacaaaagcaaattacaaatataaaaatattaatattacaaaagtgtattatattatacaaatcgaatattacgcttgtatataagaataaaacgagttattataagcatatagctttagtttaattatatatcataaaacacagatatacaaccatatatataacacaaatgaaactcaaatagagacattcacaaatatacataccacatgtagaaggcgcttatagcactaattgatataataaactatataatcttgatttataataagataatagagataaaagtatttgttaatgcctgagaaactacatttgtatatagggtattatttttgtaaatgcataaatatattattgtaaacaccatcttttgattacatttggaattcattctcataaatatacgacacatttgtaaccacataaatacacaaaagtaaatattgatagttgcaaaagcaataaaaggaagggatcaactcatactttaccaatgtatattgctatttttttctaatcatcctttacaatcttctctaaaaagagaatccttgcaatatttccgtaccgatctccacttatttattttttttcaattctaggaagctcatttttagcataaacaaatgaaatacaaatacttacccctataattcagattctatttttctattaaactagaaaaaataggcttatagtaatcaaaaatactctggattatcaaaatgacactaatggatgattttagagaaaagaaaaaatctccattctcactataaaacgatacctttaaaatccaaaatgcttttttgataaactcaagaataagtaaacttttctcgtttaaaaattaaagctcctatttaaaagaaaaagtttccttgaagatagatcaatacaaaattctaaaaatatactttgtgtagttcgttaaatgggtaactctataaaactacaaaaggagtaaatctatttgtaaaataatcactggcattgtgaaagtcttttttataatggaagtaattgcgggaatacaaaaaaagacatatacttcccgtttctatctacggtaaaagtatatgtctgattatataggtaattcttaatcctacttaatgcaaaattttgaacactaattcacgaagaatatctccatctgtcatagaactattttggactcctttggattttgcatcagcatatcgtatttctccaacaatctgcatcgtctttactccgctatattttcgcattgctgccatataatcccgggcctgccagggagttcttagtcctagcatatttgcgatcccttgctctgatttatccggtgcataataagccaacattagattggagtaaaagctgaataataaagacagcgtcatttggattgggttagttttcggattttcctcaaaatattttattatcttatttgctttcaatatatccttttccactaaagcactgcgcaattcaaagttattataatctttgcttatgcctatgtttttttctatctgttcaggagttatgcgtttttgcccggcaggtaaagtgataatcaacttttcaagttctccggtcagacgactcaaatctgaacctacaaaatcagcaagcataacagttgctttaggttccatatcaactcctttccgtttcatatatgaagctataaaaccgggaagttgtgcatcctttatttttttagattcaaacagtacaccaactttgtccacctcggcagccagcttctttctacgatccaacgttccatgcttatggcatatcactaaaatggtggaaagcaaaggcttttgaagataatacgacaactcttccatattacgtaccgcctgtgcttccttaactactactacttggtgttccgacatcatgggataacgctttgcagcatttataatcgttgccacatccacatcagccccatacacaacagtcaggttgaattctttttccgtctcactcaacacattatccgttatgtaatctgcaatcaagtcgatataatacgactcttctcccatcaggtaatagatagggcgatactgctttgctctcaattccttgaggatgtcatcacaggtcagttcttgttttgccatatataattttcagaaagaccggattaccagtcgaatttcaagtgtttaacagttttcttttcatcaataatcatgcgcaaagaagcaataccaatttcaacatgctcttctacataatttctggtaaccaaattatcacttctatctgtttttactccgtcgggggtcattggctgatcggacactaataataatgcgccggtaggaatatgattggcaaagccacaactgaacaaagttgcagtttccatatcaactgccatagcccgggtctttttcagatattctttgaatacatcatcatgttcccagatacggcggttggtggtatatacggtaccagtccaatagtcacggcctttgtcacggatggatgaagaaacggcacgctgcaacataaatgcaggtaatgcaggaacttcgggaggaaaataatcgttagaagttccctctccacggatagctgcaatagggagaatcaaatcgccaagctgatttttcttgtcgatgccaccacattttcccaaaaacaaacaagccttgggttgaatagctcccagcaagtccatgatgatggcagcgttaggacttcccataccaaagttaatcatagtgatgccttcggcagaagcagaaatcatatttgcatcccttcctaagatgggaacattaaactgatttgcgaaaatctcgacgtacttgttgaagttagtcaacagaatatactctccaaaatcctccaggttacgttttgtgtaacggggcagccaattagctacgatttcttcttttgttttcataattatctattaaatttgtgctcccaataatgggaaccattatttaacttacaaaaataataaatgttatcgttaaacctaccagtattcgacactaaaataaacgtacgaaacggaaaaaatgtaattttcgacgtaattcgtaaacgatatgtcgcccttacccctgaagaatgggtacggcaacactttgttcactttcttattgcacacaaaggatatccgactgcccttctggccaatgaagtaatggtaaagttgaacggtactaccaaacgatgcgacaccgtactttatcggagggatttatcagcccggatgattgtggaatataaagcaccacatatcgaaatcacacaggctgttttcgatcagatcacccggtataatatggtattgaaggtcgattatctgattgtcagcaacggaatgcaacattattgttgccggatggattatgagaatcagagttatacgttcctccaggatattccagattacaaatctttataaaaatgatccgcttcattcgccttaaaaaacatacttacctataagaataaaatagcgtcactatccgttcaagatagtgacgctatttgcttactatggtgacaccatcccaaacagatggcgtcactataccaactcccctttcaggtagtcttcaaacagccttttacttctatacggcaacatctttctcactatcctcatttcctttctttttgctgaatcgctcttgcaatttctgcatgaattcgtagaaattaggaatataaatggtagccaataaagtgttcatggccataccaaataccacagcggcacccaatgctatacgactttgtgcacctgcaccggtggcgaataacaagggcatcactcctaatacaaaagcaaaagaagtcatcaggatcggacgcaagcggacatgccccgcttcaaaggcagcttccctaattgaattaccctcggcacggaaatcacgggcaaattccacaatcaaaattccgttctttgcagaaagcgcaaccaacaggattatgccgatttgcgtataaatactgactggagttcccataatcagacagccaatcatggcacctaataaggctaccggcaatccgatgacggctgctaccgggctggtccaactttcatactgtgcagcaagtaccagaaaagcaacaattaacgccataatcagaacaatggtagtcgtattcccagcctgggtttcctgataggcaacggaagtccattcatacctaaactcatctcccagctgttccttaaacaatgcttccacttcttgaatagcctgcccggtactacttcccggagcaacattacaagtcagagaagcagtcgagtacatattatagcggttaatctggtcttggcctaactgttcctccactttggtgaaagaagaaaaaggcaccatctctcctgccgaattcggcacgcttagcttcaagacatcatcaattacccgctgtgcttgatcgcgtgcctcaatcttcacctggtaaatacggccgaattcaacaaaatcattcacataagccgctcccatataatagcccaatgtagagaaaacatcgttcaaggcaattcccatgaactggactttgtcacggtcgatattcaagaaatattgaggaacatttgcctgatactgactggatacagatgctaaagccggtttcgagtgataagaagcaagcaaggcattgatggcctgctgcatttccgtcggccccagattacgccggtcttccaactgaagctgtaaaccaccggatgcacccaaccccggaatagccggaggaaccatggcaaacacttccgcagcctgaatagtcatatacgcttcaccattaaaacggttgactatggcagcagccgtatgctctttccctttcctctcactccagtttttcagtaccacaaaataagttgccgagttactctgttcgccaccacccatgatagaaaagccggaaataccaatataattctttacttccggataagaatccagaataccgtttatcttttctcccactgcttgcgtacgctcaaggctggcggcaggcggaagttgaacaacagcaataaaatatccgtcatcctcgtccgggataaaagttgacggccaatgcataaaaagcaatagagcaataacagtcaaagcgccataagaagcgagagccattcccggacgttgaagcaaccatttgacaattttgtcatataccccttgtgtcttgtcataagccttattgaaacctttgtatataaagaagttagaaggtttactcttttcaagaaacagtgcgcaaagcgcaggagtcaatgtcaacgaattgaaaccgctcaatacggtagaagcggcaatagtcagcgcaaactgcttatacagctgacctgaaattccactaatcatcattgttggaataaacacggcaagcaatacgagaaccaccccgacaatcgggcccgtgatctctcccatcgcttttgtcacggcttcacgaggtgagtactgcccagtttccaataatctcgaagcgttctccaccaccactatcgcatcatccaccacaatagcaactgctaaaatcagtccgaacaatgttaatgtgttgatagagaaaccaaatgccgccattacggcaaatgtaccgatcaacgataccgggatagtaatacaaggaataatcactgcccgccaattctgcaggaacaagaaaataacgagtatcaccaacaaagttgtttcaaagaaagtaaccatcacttcatcaatggaagcatggataacatcagtcgtatccaaagtgacattataggccactcctgacgggaaactttctgcaagttcttccatcttagctttcactccttttgaaacatccagcgaattggaccccggttgctggtaaatagcaatagcagccgtaggttttccattcaatcgcgacactacactgtatgaagcagaccccaaatcaatgcgtgcaatatctttcagacgaagcatcgccccgtcctgctcacggcggataataatattcccgaactgttccggagatttcaatcgtccctgaacattcaacgtatactgaaaagcattattattatcctgtccgataggctgaccgatatatccggcggatacttccacattctgtgactggatcgattgatagacttgctgcggtgaaatattccgtatacgcatagcctccggatcgagccagatgcgcatcgaatagtcccctgctcccatcacattcacagcacccactccgggcacacgtgtcagctggtccactaaattcaatttggcataattagtcagatacaggctgttgtacacagagtcctgcgaagtcattgtcaaaaacatcacaatgtttgaagattgtttctgcacagtgaccccttgcaccaccaccggttccggcagcgatgattgtgcgatacttaccctgttttgtacctgcacagttgccatatcgatatccgtaccaacagcgaatgtaatagtcagagaatatgctcccgaagatgaagaattggaagacatataaagcatgccgtctacaccattcacctgctgttcgataggaatacccactgtttgagcaacagtttcagcatttgccccgggataaacggcagagacctgcaccgttggcggtgtgatctccggaaattgcgccacaggcaatatattgagtgtgaccagaccggctactacaataagcagggcaaggacagtagcaaatatcggtcggttgataaaaaacttagaaaacataatgtataggtttaaaagatttcatttgttaatcaatcagttatccaaaagaccttatttccctcttttagggagggaatcaggaagtggctttactttcattccgtctctgactttcatcaaagcctccgtgacatactgttcctgcggggaaagtccccccaatacctgccgtaaagtgccgtcgaccaactgccctatttcaatatgccggtaatgaactatattcgaatcatttacaatatataagtatttgcctaactggtcggttccgatagagccctctttcaccaacatggcatttttagcttctccataaggtaaagttatgcttacatataatccgctcttcaatatccctttcgggttatcaaaattggcacgaaccatcagtgttcctgtattcacatctacatttggtgaaagataatcgagcgtagccggataactttcagttcccccctttcccagttgaaccattatttttttaggaagatcagtcggtaactgctgggtatccatcgtcattgccaaccattgattatcagcaacattaaagtaagcatacatctgattatctttataaatagtagccaatgtgactggttgcaacgaaccgcctacataacttcctatatctacagtcgccttactgatggtgccgtcaaacggtgcacggacataacaatatcccaagtttgtacgggcggtgctcaaagctgcttccgcgttgctgacagctgcaacaccctctttcacagaagattcagcctgaagtacctgtatctgactgaccgcatcactctttacagcctctttcatacggctataattattacgagcatattccaattgcgcttgggcagttttcagttctgcttctgcttgctccacctgatctttatataaggttggttcaatgacaaacaacagttgcccctgtttcacccgtccacctgcgacataagaggtagactgcaaggttccgttcaccctggctacaagattcaccgtcttttctgttgtcagataacccggataatctttcgtcaaagtaatatcctccactatgggtttggtcacactaatttccggagttggcatacctcccatcgctcctgtacttttcttctccttgcaacccgtcaatataggcagtgcaagaaagatatacatcagttttttcatatctgttaggttatatattttatagattgatttttattctctccaaccaccccctaaagccttgtagagggctatcagttgcaaaagcgaactaccttgtgcctgtaccagctgattctcataagataacagagaacgttgtgcatcaagtacgttttggaaaggcgaaagtccctgtttataaagttccagtgaaagtttcaatgtctcaattccttgattgcgtacttcccgcagggctacaatctgtttgattgaattccggtaggaattcatagcattgtccgtttcctgtacggcagttaaaaccgtctgattaaactggttgatcgcttcatccagttgcgcttttgccagccgggttgcattcaccagctgtcctccattgaaaatagtccagttcaatgacggagcaatttcataagtcatacttttacttttggtgagatccttcaggtcacgggcggcatatccaaatgaacctttcaagaaaactttcggcaaccaatccgctttcgaagctccaagcaatgctgcctgcgcatttacgctcaattccgcacttcgtacatcaggccgtcgcagtaataaatcgacaggcattcccactccgataggttccatataatcgggcaatgtaccactagattcaagaacaggacgaatgtcctggggatacattcccaataagacagccaatgttgtgatatactgattgatacccgcttccaactggggaatggaggcttttgtgctatataatacagacttggcctgtgccacatcgagtttagcaaccagcccggtgttatagcgtacttccgtgattttcaggacttcttcctgcgaagcactgtttttcttcaccacttcaagctcttgttgcaactcccttagattgatataagccgaggctacttctgcagctaatgagaccatgactccagtgtattcttccttgctggcggcaaaattctctttctgcgcttttacccgtttccggatactgccgaaaatatcaagctcccagctcatgcttagcgaagcatcataataatgatcggttgtttggggcagtgaacttgtatttccactggtttcctgacgggtccatcctgcattcaatccgatggaaggaaaaaagttactgcgttctatccaaagactggcacgagcggcagctatacggttgattgccatggcaacggagtaattacgatctactgccagagctatcaaagagtccagtttggtgtcttggaatgacttccaccaatggtcatctaccggaagtatctgttgaaacacttccccgctctcttcccaatcttgaggaagcggagctttcaaataacggtttgcggtctgtccaaccgcggtcacagttgaaagaaacataaggagcgatgtgccccacactcgtatattcatatcagttcaggtttttatgaaatgaaaagataacaactaaagggtaagtttgtttatcgattccttttatacgagcacttgttaaaacaaaaaaggaggtgtgtcgtaatgcacgatgcacctctttttttgttcatcactatacaaatctgttcactttctttaagctgcgatcttttgaagatttctttgatttatgtgttcccagcatctaaaaacagcagttgtaagctcataaaacagtctaatcagccagttcatacccttttttgtcagttttgcacacatcttttttatattgaaggcaatggctaggaaggcaaagtccatgaagaccttgtcctttccaaaatgtcggaaacgtttgtagttcatattgtttttaatttgtccgaacacggcttccggttctatgcatctctgccctctgtgtttcagtcctttctcagagcagagcagttctttggctctccgcttgtattgtctaagcctatgattcagttctatcgtcctgtttccttttgctttaaaacagcggcatcgcaggggacagccttcacacctgacagctctgtaccgtgcattttcgttgacatatccggatgcggttttcacattcctggtgcctatcctccgcatcctttgccccatagggcagatgcagaagtcatgttcttcattgtagtagaagttttcggccttgaacgggtccggtttgaatctcggccgctgctccatgtggaaatagttgtactttacgtaggcttccatgccgttttcggacatgaagcggtaattctcttcggagccatagccggaatcagcaaccaccgtatgggccatccggtcatacctgtttgaaaaagattgcaggaaaggaatcagggtcagtgtatccgtagggttcgggaagagtgcaaaatcggtgatgaactgattttcggtgccgatttgaaggttgtaaccgggcttcgtctgtccgttgcgcatggcatcctccttcattctcataaaagtagcgtccttgtccgtcttggaataggaattcctctcttgcagcgtttccagatggcagtcgtattcctgcagtttgtccctgtgttcttccagttccttcaactgtttgcgtttctttttcagttcagtcttttcctctttcgcggatggctcggaaacctgttccagtgcatgacgcaattctcctgccatttcagtcagcatggccggagtgaacccaacctcctcattgttctctgatgacttctcccgggcaatgacatcgtctatctgccctaacaggacatgtatcttcttcatcaggcgttcacggttccgctcaaccgtttttcgccagacgaaagtgtacttgttggctttggattcgatctttgtcccgtcaatgtattccacattcaggctgatgaagcctttggaagagagaagaactacggtttgcgtaaacacctcgttgatttccttcttcacccggttgcggaaacggttgatggtaatgaaatccggtttctcatatccggccagccagatataatggatgtcacggtgaaggagcttttcaattttccggcaggagtagatgttgttcatataggcatacagaatgaccttgagcatcatcctggggtggtaagggctgcgcccgcattccttatacagctttctgaaactttcaagattcaagccctcaaccagggcgtcaaccatgcgcaccggatcgttttctgcaatatcctcatcaattctttgaggaaaaagaacggtttggttgggattgtaaggacgaaaatgtatctttgtcatagtgaaattcttatgcctaaagatacaaaatctttaggtaataacaaagccccagcttgtgaaagtcggggctttgtgcgtaaaaaacagaaggtgtgcatttggacacaccttctattatatatcaaaaaagtaactttacttacttcactgctcttcttattcagcagtttttcttctgatagctcttttggtagtagctaccggagcttcttccaccttgtgttcgatttgtacgccagccaattccgggtcaatcataatacgtccgcaatattcacaaacgattactttcttacgagaacggatatccagttgtctctggggcggaatcttgttaaagcaaccaccacaagcgtcacgctgtacgtatacaatacccaatccgttgcgagagttcttacggatacgtttgaaagactgcaacagacgcggttcgatcttagtttccaaatctttagctttgtctctcaatttctcttcttcctgtttggtttcagagataatttcgtccagttcgctcttcttctgctcaaggtctttcagtctttcgttaagaatctgatcgttcttcgttacttcagcctctttttcttctttatcagcagaatattccttaattctcttttcgcaaagttcgatttccaatgtctggaattcgatttctttcgtcaagaaatcatattcacggttattgcgaacattgtcttgttgtgacttatatttttctactgaagcctttgctgtttcaatttctactctcttgccggcaatagcagatttcagttcatccacttcagctttgatcttgtcgatacgggtactcaaaccagcaatttcatcttcaaggtcttgcacttccaacggaagttcacctctcaatgtcttgatttcatcaatcttagacaacatcgtttgcagttggaacagtgtcttcagtttctgttctaccgtcaactcattcggatctttttttgcttctctagccattttacttataaatattttatgggattcgtatttattttactcaattggagtgcaaaattaggaaataaatcccggattatggaataaaaaatttcttttgtatattgttcgctttcgtaatgaccaatctctgccatcagaatatcaccctcgtggccgaaataatcatgatatttgatttctcccgtaataaagacatccgcacccgtccgaattgcctgtggaagcaggaaagctccggcaccaccacataaggcaaccttctgtatttctctccccgtcagtttgttatgacgtacacaacccacttcaaagattttcttgatgcgtttcagaaactcgagttccgtttccgattcatccaattcacctacaattcccgaacctgcctgcaaccagtcattctgcaacggatacaagtcaaatgccggttcctcataaggatgtacagacaataaagcctttataacttccgcttttttatatataggaagaatggtttcaatcctcacttcattttcatgatgcagttcaccgattgttccacagaaaggatgcgttccctcttttgcccggaaggttccctctcctttcagattgtaactgcatgaatcatagttacctatatttccgcatccggctgcaaacaacacttcgcgcacactatcggcttgtgcatccggcacgaaagtcaccagcttaatcagacagttctctttcggttcgagcactttcagattcttcaaccctattttctctgctatcttataattaactccaccttgtgcattatcaagattagtatgtgctgaatagatcacaatatcattctttattgctttcagtatgcagcgttccacgtaatctttgcccgtgatagatttatagcccttgaaaatgagcggatggtgcgatataacgagattgtaccccagcgcgatagcttcatccaacacagcttcggtaacgtcaagacacaacaaagcccctgttgcttccgcttctgtcaatccgatttgcaggctggcattatcaaatccgtcttgcaatggcagaggcgcgaatcgttcaagggcgcttactatttccttaattttcattattggtagaaaatttggttgcaaagataataaataaaataggaattaacatactaagtgatcgttttttagagaatttatcgttatccattttttgagatccccgtaaaagatataaaataccacccagaaactatcaaaaaggacctaaaaactatctgttgatagaaattcccctaaattacgtctgattctcccctaccaaggtcgacaaaatatcttaaacttgcatcatcaaaatttttacaacgaatactcacattttaaaaacaacacatatgaaaagtttaagcttcagaaaagatttggtaggagttcaggaagaattactacgtttcgcatacaaactgacaacagaccgcgaagaagcaaacgatttgctgcaggaaacctcattgaaagcattagataatgaagataaatatacacccgatacaaatttcaaaggatggatgtacaccatcatgcgcaatatctttatcaataattatcgtaaggtagttcgcgaccagacatttgttgacaagaccgataacctttatcatcttaatttgccgcaagatgcagggtttgaaagtactgaaaggacatacgacctgaaagagatgcaccgtgtagtcaatgctcttccgaaagaatacagggttccgttcgccatgcacgtttccggattcaaataccgtgaaattgcagaaaaactgaatcttccgttaggtaccgtaaaaagtcggatcttctttacccgtcagaaattacaggaagaactaaaagacttccgctaaaccataactatatccatataaattttagattaaacagttaatttcatttttcagttttatcaataggcaaaaggcaaaaagagtttatattctttttgccttttgcctgttttcatcggataaattcggataaaaaccggttccggaataaaaactaattataaattttcgcctaaagcttccgttatttattgaaattctgtacttttacttcatctaaataatgaatacgatgaaaacaaatttgactttactgctcctgctagttatgatggtttcttgccagcccaagaaaagtgatagtatcgaaatgtccgtagccgaggctgcaaagattgacaatatcgaagattgtgcggcagatacggtcaaagctaccgctatcttctggattgataaagtagaaaccaaacactgcaaagagtacggttttcgcacaatcaaagctagggtgctcattcgcgaagacgggaaggttgatttgctgtcttcgtcaagaaacaatcgcctgatgtagagaagtatatacgccatcacctctctaaatttcaagtaacggaaaagatgtttgaaggcggttatgtgcaacccggagaacaattcgtgcagcttcgctgcttatggggaatgttgaaaggcaaataataaacacgctaataaccggttagcttttgcttttcatttgcaccttatttatcatttgtaccttgtttttcagtgcataccgttcgtctacgactctgtccgtagggaagaaagtgaaaataagccgccactctccttccttatagataaatttacgtccactggctccacgaagaattgcttcgtatttttcctgcaggaaagcctcgatatgttccggcatttctgtgccggatgctgaaaactccactgttataaagaagtgtggaatagctatttcagctactttatggaatatctggtcaataacagtcatttcctgggttcttttgttacctccagcagttttccgtatgcatcaaaagatcgacgcgaagccaatgaaatagtaatcattagcgatagcatagatgctgtgaaagtaatcaccataatcatcatctgatacttgatagcgacattcgggctgcttcctcccagaatttgtccgatcatcgtgcccggaagagccaccaatcccatcacggcaatgttcgcaatcaggggactaaacgatttaatgatggcctgccggataaatggagcctgcgcttcctgccttgttgctccgtttcccaataaataccgatatagttgctgttcacgtttcaatccactataataagtattcaaagctattacattgctcgacagcatattacccatcagaattccaaatattggaataaagtattgggcgctaaatatattatccagttggagaacaataccgataaaatagatgcctaccaatacaacactacaaagaaatcctaccgtaatagggattaataaaacactacgtttcaactgagtacgtaccaatgcggtctgcccggccacgaataccataattatcacccaaagaaaattaatccagggattgttccataaaaagagatatttcagatacatgccgataaagaacagctggataatcatccgtaatgtaccaatcacggcaggtttcagcaatcccgttttaaatttccaaaggtaaaaaaacggaatggcaagcaatagtagccctataaagagattataatatgatatatcaatcgttcccacaatatattcttaacaattctatccgatttgcgttacagttcaattaattacagttctattaaataatgacagcccgaagcaaagtccttatcatgtgatacggctaacacagccgttcctctttccgcctgtcgccggaaaaaagacaggactttaccggttgatccggcatccaaagcagaagtcggttcatctatgataatgagaggtttgttgagcattgcagccacagccaacataatacgttggcgttgaccacccgatacttcattcaccctctttgtatataattcgtgttccagccccaattcatcgaaacaagtgaaaagtctttcttccgaaaaaggaacagaacgattcactttcagtccgaacgggagagccaccatctctttgacccattcaaaaggtagtgccaattcttgaggaatccatgcaatctgtctgcggacactatcgatagtcgatatatcaagcaatgtttcccctacctgtatagatccttctttcaaaggcacaaaccccattaccgcattcagcaacgaagtctttccacaaccggattgaccgacaatgcaagccgtttctcccctttccaacttcatactgaaaccggagaaaagcacttccgtaccaaaagcaatacaggcattattaatatgtaacatctatttgttctcttgaaaatcctgccaaaattatatttattgaagttccgccacccacttctcaatgtttcgtgtttcagcactaaaattcactccaatcttaaaaagtgttcgcccatcactttcgaaaggtttagcataatgcttttcattgatctgctgcaaggcttcttcagccgtaccctccagcttgaattccatgacatagataaatttatcagtctgcaaaacaagatcgatacggccctggctcgtgtgatattccgcttttacataaaaaccgactaatttgaacacgataaagagaacattctgataatgcaattccaaatcgcgaaccaattcataaggagtatctgcaaagaaactctgaagacgacggaaaaaagaatcataatctcccgaacggacttcgcggacaaacttctgaatctcaaaagatgattctacggcatttatattggcataaaaaggcatgagatatttcacaaaaccttcctccacttcacgattgggaaatcccaggcgataagtttcaaattcacgatcgtagccttttatggtaagataaccgctctgataaatcacagggataggattgtcggaagttgaatcaatactattcagtacgtcggcactagtttcttcatgagccatccggtgaagatcgtaatgatgtttttttagtaattcgaccagataagtaggtgtgcccgtttcaaaccagtagttgccaaacacattgtatttaagggtgttaagtacactgaacggattatacatacctatagaatcatgagtgaaatgataaccatcatatctttcacgcatttctgtgcaaatttcatcatacgtcaaaccttgcgcatcggcaaattcatgcaattcagtttcaaagttctcatgcaactcacgatcactgattccgcagatttctatatactgctgacgcatagaaatatcctccagattattcagatcgctgaatacacttacttttccgaattttgtaactcccgtaagcataccaaatttaatgcagccatccttgctttttaaagctccatagaaagccttcaatgtatcacgaaaactcttctggagttcatcattaccaatcgcctgtaacataggcttatcgtattcatccacaagaataacgacactctggccctctttctcacaagcacgctgaataataccctcgaaacgcatagctagagaagtttctgcagattccgctccatagattttttcccattccaccaatgtgcgattcagcttattttcaagtctttccggtgtatcgtatttttctgtattgaggtcaatatgcaggatcggatatttaaaccagtctttttccagtttctctatcgccaatccttcgaaaagttttttcttcccttgaaaataggcttccaaagtagacagtaacaaacttttcccaaaacgacgtggacgactaagaaaataataactgccagttttcaccatttgatatatccaagcagtcttatctatatagcaataacctcctttacggattttctcgaagttctgtatgccgataggataaattttattactcatatactcataactttataagttgacagatacaaagatagccttttccacccaataacacaaagtccgatacgaaagttttttcatatcagactcaaatgatagcccctatttatttcatcatctagtgtaattttgccaattttcatttatctttgccttactaattaattcaagaaagttatgatactgaacgaaagagacgctcgtcacgagcatatattgcaggtagcacgtcagatgatgacggctgcgcgcactgctccgaaaggaaaaggaatcgatattattgaagtggccctcatcactgatgaagagattaaacaattatcggacactatgatagctatggtagaagaacacggaatgaaattcttccttcgtgatgccgacaacatcctaagtgccgaatgtgttgtactgataggaacacgcgagcagacacagggcttgaactgcggccattgcggatttgccacctgtgccggacgtactgatggagttccctgcgcattgaacagcatagatgtaggtatcgcaataggttccgcgtgcgccacggcagccgatttacgcgtagacacacgcgtcatgttctccgccggattggcagcacaacgcctgaactggctgaaagactgcaagatggtaatggcgatccccgtaagcgcatcctccaagaatccgttctttgaccggaaaccgaagcaggaaaacaatgcataacagtcacatcgatgcagaaaacaaactgactttagatgcagacaataaactgattttataaaaaactaaatatatatagtctaatgggaatcatggttggactccccagcccaagcggctcggagaaagatttgcagttgaacttcggcaaaaacatgaccgtacaggtagaaatgaaagcacctcatttgcctgccgaatggcacatgcagagcggtatacagttaacatggccacatgccgatacagattgggcctacatgctggcggaagtgcaagagtgttttatcaatattgccagggaaatagcgaagcgtgaattattattgattgtcactcccgaaccggaagaagtgaaaaagcagatagctgctactgtcaatatgaataacgtccgctttctggaatgtgccactaatgacacatgggcccgcgaccacggagccattacaatgatagataccgacaccccttccctgctcgacttcaccttcaacggctggggactgaaatttgcttccgaactggataatcaaattaccaaacatgccgtagaagccggagctttgaaaggccagtatatagaccaccttgacttcgtactcgaaggaggttctatcgaaagcgacggaatgggtacattgctcaccacttccgaatgtctgctttctccccaacgaaacggacgactgaaccaggtagagatagaagaatacctgaaatcaaccttccacctgcaaaaggtgctttggttagaccacggttatctggccggtgatgatactgacagccacatcgacactttggcacgcttctgttctaccgacaccatcgcttacgtgaaatgcgaaaacaaagaagacgaacattacgaagcactgcttgcaatggaaaaacagctgaaaacattccgcaccttagcaggagaaccctatcgcctattagccttacccatggcagacaagatagaagaagacggcgagcgcctgcctgcaacttacgccaatttcctgattatgaacgacgttattctctacccgacatacaatcagccggcgaatgacaaaaaagcaggagaagtattgcagcaagcctttccaaaccatcaaataattggaatagactgccgtgccctgattaaacagcacggttccctacactgcgtcaccatgcaatatccgctgggtgttataaaggaatcataaaagaattacaaaggagctataaaggaattataaaataatgaatgaatcaacccactaattattcatcatgagaaagataaaagtcggaatcatccaacaatccaataccgcagatattaaagccaatctaatgaacctcgcaaagagtatcgaggcttgtgccgctcacggcgcacaactgattgtgctccaggagttacacaattcactttatttttgccagacagaaaacacgaacctgtttgatcttgccgaaccgattcccgggccttccacaggcttttattccgagttggcagcagctaataaagtagtccttgtcacctctctttttgagaaacgtgctcccggactttatcataataccgctgtcgtattcgaccgcgacggaagcattgcaggaaaataccggaaaatgcatattcccgatgatccggcttactacgaaaagttctatttcactccgggagacattggttttgaaccgattcaaacttctttaggaaaactaggcgtattagtatgctgggatcaatggtatccggaagctgcccgcctgatggcactaaaaggtgcggaacttttaatttatcctaccgccattggctgggaaagcagtgacacggacgatgaaaaagcccgccaactcaatgcctggattatttcacagcgcgctcatgccgttgccaatggacttcctgttatctccgtcaaccgtgtaggacacgagcccgatccttccggacagacaaacggtatcttattttggggaaacagttttgtagcaggaccacaaggggaatttctggcacaagctggaaacgatcagccggagaacatgatagtggaaatagatatggaacgttcggaaaacgttcgccgttggtggcctttccttcgtgatcgtcggattgacgaatatgatgggcttaccaaacgattccttgattaaaggcttacccacataccttcatcgtaggaggtttatctaataaagaaaaaagaagaaggtgtgtccaaatgcacaccttctgttttttacgcacaaagccccgactttcacaagctggggctttgttattacctaaagattttgtatctttaggcataagaatttcactatgacaaagatacattttcgtccttacaatcccaaccaaaccgttctttttcctcaaagaattgatgaggatattgcagaaaacgatccggtgcgcatggttgacgccctggttgagggcttgaatcttgaaagtttcagaaagctgtataaggaatgcgggcgcagcccttaccaccccaggatgatgctcaaggtcattctgtatgcctatatgaacaacatctactcctgccggaaaattgaaaagctccttcaccgtgacatccattatatctggctggccggatatgagaaaccggatttcattaccatcaaccgtttccgcaaccgggtgaagaaggaaatcaacgaggtgtttacgcaaaccgtagttcttctctcttccaaaggcttcatcagcctgaatgtggaatacattgacgggacaaagatcgaatccaaagccaacaagtacactttcgtctggcgaaaaacggttgagcggaaccgtgaacgcctgatgaagaagatacatgtcctgttagggcagatagacgatgtcattgcccgggagaagtcatcagagaacaatgaggaggttgggttcactccggccatgctgactgaaatggcaggagaattgcgtcatgcactggaacaggtttccgagccatccgcgaaagaggaaaagactgaactgaaaaagaaacgcaaacagttgaaggaactggaagaacacagggacaaactgcaggaatacgactgccatctggaaacgctgcaagagaggaattcctattccaagacggacaaggacgctacttttatgagaatgaaggaggatgccatgcgcaacggacagacgaagcccggttacaaccttcaaatcggcaccgaaaatcagttcatcaccgattttgcactcttcccgaaccctacggatacactgaccctgattcctttcctgcaatctttttcaaacaggtatgaccggatggcccatacggtggttgctgattccggctatggctccgaagagaattaccgcttcatgtccgaaaacggcatggaagcctacgtaaagtacaactatttccacatggagcagcggccgagattcaaaccggacccgttcaaggccgaaaacttctactacaatgaagaacatgacttctgcatctgccctatggggcaaaggatgcggaggataggcaccaggaatgtgaaaaccgcatccggatatgtcaacgaaaatgcacggtacagagctgtcaggtgtgaaggctgtcccctgcgatgccgctgttttaaagcaaaaggaaacaggacgatagaactgaatcataggcttagacaatacaagcggagagccaaagaactgctctgctctgagaaaggactgaaacacagagggcagagatgcatagaaccggaagccgtgttcggacaaattaaaaacaatatgaactacaaacgtttccgacattttggaaaggacaaggtcttcatggactttgccttcctagccattgccttcaatataaaaaagatgtgtgcaaaactgacaaaaaagggtatgaactggctgattagactgttttatgagcttacaactgctgtttttagatgctgggaacacataaatcaaagaaatcttcaaaagatcgcagcttaaagaaagtgaacagatttgtatagtgatgaacaaaaaaagaggtgcatcgtgcattacgacacacctccttttaatatatcatcataaataactatctcattgaaacgttatttttttgttggctaggaaattagcccctccataaataaacaatcccaggaattgagccagatattcattcacgtccaatccttctaccaataagacaagaaataaaaactgtgcagtgtaagccacggcaaaagcagagcaaaagagcagtatctgtttccagatactattctttttattttctacggggaatatccaatatttgcaccagataaagttatggatttgagctatcagatacgctgttatattagccaccatatagtcaccgtcaaatgacatttctttcatcattaaccatacaaccaacgccataattaaggcgttcattgtaccgatgattataaaacggaatatgcgtacagattctttcactcgccctctttcagatcaacgatcaaattcagttcatcaagttgagtctggtcgattgcagacggtgcatccagcatcacatcacgtccggaattgtttttcgggaacgcaatacagtcgcggatagaatccaaacctgcgaacaaagatacccaacggtcgagtccgtatgccaaaccaccgtgaggaggtgcaccatacttaaaggcattcatcaggaagccaaactgtgcctgtgccttttccggagtgaatccaagaatctcgaacatcttcgcctgtaatttcgcatcgtggatacggatagatccgccaccaacttccacaccgttcactaccatatcataagcatctgcacgtacagctgccggatcagtatccaacatcggaatatcttcctctttcggatgagtaaacggatgatgcatagccatcaaacgaccttcctcctcactccattcgaacatcgggaagtcgatcacccaaaggcaaacaaacttattcttatcacgcaatcccagttgagcgcccatttccagacgaagctcacaaagttgtttacgtgttttcattacatcgtcgccagacagaatcaggatcaaatcacccggtttagcaccgaatgcctctttcatttgctgaagcacttcctgcgtatagaatttatccacgctcgattttacagttccgtccgcttctacacgggcatacaccataccttttgcaccaatctgcggtttctttacgaagtccgtcagtgcatccagttgtttacgagtataggttgcagcaccttcagcacagataccacccacataagcagcattatcgaatacagagaatccgtgacctttcatgatatccatcaattccacgaatttcatgccgaaacgtaagtccggtttgtcgctaccataatatttcatggcatccgcccaagacatacgctggaacggttcagccagttccacgccacgcagtgttttgaacaaatgtttagccattccttcaaaagtagtgataatatcttcctgctcaacgaagctcatttcgcagtcaatctgcgtaaattccggctgacgatcggcacgcaagtcctcatcgcgaaaacattttgcaatctggaagtaacggtcgaaaccagaaaccatcaacaactgcttcaatgtctgcggagattgcggaagtgcgtagaactgtcccggattcatacgtgacggcaccacaaagtcgcgtgcaccttcaggagtagaaccgatcaaaacgggtgtttccacttcgatgaaacctagactatccagatatttgcgaacttcaatcgtcattctgtggcgcagttccagattagagcggacagcgttacgacgcaaatccaggtaacgatatttcatgcggatatcatcaccaccatccgtattatcctcaatggtgaacggaggagtcatagcagtatttagtacgttcagttcggaaacgatgatttcaatgtctccggtaggaatgtttgcattcttgctgaaacgttcattaaccgttcctgtcacttgaatgacgaactcacgtcccagtttattagcacgttcacagagttcagcattaatttcttcgttaaagaccaactgggtaattccgtaacggtcgcggaggtcaataaaagtcattcctcccattttacggctgcgctgtacccatccagacagcgtaacttgcttgtttacatcagagattcttagttctccacatgtgtgcgttctgaacatatattttttatttaaacgattatcactcgcgtttctattttgattgaaccaaaactgcgcaaaagtacgcaataatttgtaattcgttgtcagtaatccgttattttatcagactttctttgtcagctttttcaatattttcttgtttctgtctgttatattgtcgacgatggcttcattcatcaatttgatgccattcatatattcctgcgctctttggagcacattggcagcatccttttccgacgcttgcggcaccactacgcgcaatcccctttgaatcaactcaatgttcacattagcgtccgtttccatgggatcaccgtcgaagtgcactactcccggagtagtgcggcggatgcacaactgcttgcaacggaaagtcttgatacggctattctgatcgattgtcttattgaataactgaaaagccaatgaagggacatccaatacggtgaacggttcgagaatggtcacatccagcaagccatctgtcagcgtagcttgtggggcgatataagcattgtttccatattgcgacgcgtttccacaggcaatcaggaaagccttatacttggaaactccgttttccgtttccagttcatacgtttccggttcatatttaagactctcttgcagggtcttttccagataagtcaacaccccgcgtttaccggcatgcgcaaacttcagactaacaaaagcatcgaatcccactccgcaagtgcagaaaaaatccgtcccgttaatcttaccataatctattacgtccatgcaaccttcgttcagcacttccagcgccctcttcggttccatcggtatatgcagatgcctcgccagtccattacccgatccgcagggaataattcccagtgcggtatcagtatgcaccaacgaacgagctatttcattgattgtcccgtccccaccgatagccactactatatcagtcttctcttcggcagctttagcagctatttctactgcatgaccggctctctccgtattcactacttcccaagagtatctcgccttgtctattttttcgtccagcaagttaagaatcaattctttactttgtgttcccgaaataggattgacgacgaattttatttttttcattctttcgttcatgctattcttgtcgattgtagacgacaaaagtaatataaatatcttaaattttaatctattagaggtttctaatcacatgagggcaacttttttctcttaaaaagaacagataaaagcaaattttgttatctttgccccctgtttttaaacacttgttaagataaaaggatgtaagatcgtcagcgaacgatctgagtatgagtataataaattataattcatgggattattacaagagaagttagctaagtacgacctgccacaaaagtttatggcacagggcgtttacccatatttccgtgagatagaaggaaagcagggtacagaggtagaaatgggcggacacgaagtgttgatgttcggttccaatgcatacactggccttacgggagatgaaagagtgattgaagcaggtattaaagccatgcataaatatggttccggatgcgcaggctcgcgcttcttgaatggtacacttgacctgcacgttcagttggaaaaagaactggctgcctttgtaggcaaagatgaagcactctgcttctcaaccggttttacggtgaattcgggagttattcctgctttgacagatcgcaatgattatatcatttgcgacgaccgcgaccacgcatctatcgtagatggccgtcgcctctccttctctcaacaactgaaatataagcataacgatatggcggatctggaaaagcaacttcaaaagtgcaacccggattcagtgaagctcatcatagtagacggtgtgttctctatggaaggcgacctggcaaacttgcccgaaatcgtacgcttgaaacataaatacaacgctactatcatggtagacgaagctcatggcttgggtgtatttggaaaacaaggacgtggtgtttgcgaccatttcggtctgactcacgaagttgacttgattatgggtactttcagcaaatcattggcttctatcggtggattcattgctgctgattcttctatcatcaactggttacgccacaacgcacgtacttatatatttagtgcgtccaacactcctgctgctactgcatctgctcttgaagccctccacatcatccaaaatgaaccggaaaggcttgaagctttgtgggaggctaccaactatgcattgaaacgtttccgtgaagcaggttttgaaatcggtgcaacagaatcacctatcatccctctttatgtacgagacacggaaaaaacattcatggtcactaaattggctttcgacgagggtgtatttatcaatccggttattcctccggcatgtgcaccgcaagacactttggtacgtgtggcattgatggctactcatacaaaagatcaaattgaccgtgctgtagaaaagttggttaaagcatttaaagcattggatattttataatctacgaggaatatatcactcttatcgggtgaataaaataaaagtctgacacaaatcaatgtgccggacttttattttatcttattcactcttaagtacttctgccggattttgccgggcggctttccacacgcgccaaataatgcttaggaaaatgacaagtcccattcctatgaatatgactgcatagagccaccattctatcggtgtttgctttatataattttctagccaatgtttcatcatgacatatcccaacggaaaagcaaagaacgatgaaaacacaagtaaaagtaaatattctctaaagaatagattcaagatgattcctatattggctccatttaccttgcgtatagctatttctttacgacgttgctgacaggacagagtcaccaatgagaatataccgaacacggcaatcgctatacatataaaggagactatgctcaacaattggcacaatgttttctctgatttcatataagtgtcataaacctcttccatattagacaagatcaattccgcatttggattaactttatccacttccgcttttatcttttcagaaacaatgttccaagttccctccttcaccttgaaaataatgcctcctctgcctgtattatccggcaaaaaaaacatagcaggggctaccgggtgtattggggcattatatgaaatatttttaataacccctttcactatataatgccttcctaatttatcaattttctttccaaccggttgtgtccatccgaaagttttcacagcagcttcatttataacaaccatattttttccatccttttcatccagcatgcttccctccagcacctcaactccaaagaaatcggcatactcttgattgatcgtctcatcttctagatctatatattgctcactatcagttgtctttccttcccactcctttatcttgaatgttgaaaaatacattttgggaataggtgtctgaaagccactcaaatactttgtaacattgggcatctgttctaatatttctttaaaaggaacattttcagagcaataaacaacagctcccacattatgccgttctattccaagttctttggtattcaacaagaagttaagttgcttcatcatcaccaaagtacaaaaaacaaaggctataccaataaacaactgaaataaaatgctatattcacagaagaagtaaaggattactgggatttggggagaattaccggcgactgacacgaattccgatgcctgtccgtataaagtatctgttgcagaattgtttatggacttaaagaaattacccaactatataccttaatgtaccaaacttaaaaacaaatcaatattgccaatttgcgaggtaaaaataaagagggaggcctcacggctaccctctttacattaatttagataaacaactttaatatagtattagtttaaggtttataagattagtttcgaatcaagctgattacttctttagttcagaataatctatgaaaatagactgcttatatgttctgtatttttcagcatattcctgtataagttttggtctatctacgactttgctaattagacaattatacacaaagtctcgtttattgaaatcagtgtcatttgcagtttttaactgtttcaacatttcatcagctaagttgcccatgtagccaaaatcttcgtgtttcgtaatttgtttagtctctatgatgattggttttgccttcaacatagctgctgtgccttcccttggatttttgtactgtttacgaattttgttgtttggtacccaccatgacattgtacctgaatatttggcagatttagctaatcccttgtcaacagtcattgttatcgtaacatcataagttgtatcaaagtggttatttcctgttgcatttacacgttgtttcttagttcttttgaatatgcattgaccatgataaactctacattcattgactgtaatatacggcgctgtaacagttatgacatcagcttcattaattggttctatccatttagttttataaacacccgttgcttgcatattttcaatttcaacaggtttgtttaattcagtttcaagacttgttaagatatcgtctaactcatttttcacagactttagcttaatcagctgatttatagcattactatgttggctagcagttactcgattgtttttatatagccttattgcagtagcataagcctgtgctatagaatcacgtttagcacgtgcaatagaatcatattttgcgtgaattggattagagggcgttataggctgaagtctacgcacggcacgttctaaggcggtagtatttaatctttgttcaaattcgtgcttaggactgttaattgatatactaataacattatttcctttctctatattatacggtgccataagtgctagtatgctatctacttgctgatttgcacgttctgtctctgcgatatatcgttgtatatcattttctgtaagacatgtatctaacatattaatgtctattcgcaagcgccttataacattgtcgtaatgtcgtttttgttcaactgttatagtttcatctcgttctcgttgtcttgcatatttcttggcatccttaaaaaagccaccgaattgtgcagatacagttgcagacattagcaacatcgctagtacaatttgtaatgttttcacgttctttgatttgttggtcttcctagtctcaacagaagggtattaaatagaagaagcgtgagactattagacttatacctaatgtcggttctggactacctctgtattgaatataagtacaaacagctcacgcccttgaccgtatatcaacacacgagtgtgcggtatacaaaccaaagggagaacgttttgactatttcctcaatacagttgaattgtccagattcacattagagaaaaagcactaaacgcttcctaaataattaagacgtcccaaaggacgctacaaatatactacaaatttctttaattgtatatgttatacttcagatttgcgtgtttaagtcttttgtttatcttaggcataaattccataaacctttgcatgtcagttaatgttctagtgttgtatctataggcgaactcattacagtacatttgtaagtacttaggactgactacatgatagattccttttatgccacgctttagatgtgaccaaaagccctctataccgttagtatggaagccgtcctttgcgtaaagtcctttactatgttctataatgacacgtgtataaagatgcgatagaccgttatagcctgcccaaccatcggttaccaatgttgagccttcctcaatcagtccaaatactaatagatgcaatgttttctgacttgcatcgtaggtaacgaccggatagaccctatcttctgttagtacacctaccacaggagttttctctttaaggcttcttccttgtgtacctttgttccatttgttcttatttttgccaccgacataggtttcatccatttgaactataccacggaatttctcaatttcatctttgtacatattatgtcttattttagtcagcataaaccacgctgtcttttgagtgacatttatgtctcttgataattgtaggctactgatacctttcttatgagataggaagatgtaaatagcatagaaccatttctccaaaggtattttgctaccttcaaacattgtaccgacagttacagtaaaccgtttcttacaatgcctgcatttgtagagcccatcgaactctcccttgttctttaatttgtagtgatgttcagatttgtgtttacaatgaggacataccggtacgccttgccacctatattgttctaagaactctctacatgaatttttatcatgtagggtgctcattagctctataagtgactttatctctcgcatacccgttttaagtttttgacgggtaatactgaaccgatgtgttcatatttgttatattttgtatttaaatataacaaatttaattaacgcattaaaaatcagatagttaaataatttcctatcagaatttaaatgatgttaagtataactaattggttctatatgcagataaatttactaaaaaatagcaatatgaaaatagatgtaagacaaaaatccgataatactgaaactgatacagtattatcggataagtttaataaacgacgcgaacaattacggtatgaaacctatgaacatttagttgctactggtttctttactggtacatacgaagaatataaagaacgaactaaattaggattaattggccctacgcaaacattctagtaagttcttgcgcgagttttttatcaatactaggacacagcctatgtaacatatcagcagttatcaatgataaattcggttctaatgttcttgcctttaatattatcatgtcatcatacttcaataagcgcttaacattatgatatgctaatttatatggttctaagtctataacagagtcatcgttaataccattatagttcatagaaaaatatgttgctagtccttcctctaaaacagtagtactaccgtatttatttggttctaaacaatgtatagtttcatgtgctaattgaaacaatgccttgtccatatcatttatacaatcttctgttaattgaatgataatatgcctgcaatctcctggaaaccagatttgtggttgttttatatctgctaattcgataccaagtattgtatagtctttatttctttgaccaaatgagcgttcggcttcatgtaacataggacctagttgtgaaactattgtaaatgtatatccatcttttgatggtaatagctcgcaagaaaaaatattatcgtgtagcatatttgttagatattagttgctaacaaatatacaaatgatttagttaccttgtatcttaaacatgttattgttataagaactttaacattttgactttggtacattaaggtatatagttgggagaaattattcccggaagagtatattcatttcgaaatgcctacatccgatttatatttatatgcagaccgggcacagatagagcaagtgcttatcaacttgttaaaaaatgcccgcgaaacgtgcgagcggagaacggataaaaacattgagataaagtttttttctaaaggcaacccaacattcacaatatctgataatggtgagggaattttgccagatgttctggataagattttcgttcctttctttactaccaaaacatccagttcaggcatcggattgagcctgtgcaaacagatcatgactttacatgacggaagtattaacgtaaaatcagaaatagggaaaggaagttgctttattcttactttccctaaataaaaatcactgaaagcctcccgaatcctttaatacaatgattagtctgggtagtagaggaattacttatcctctactacccaaactatttgtatcaggatttaactccttaacagcctctttgaccgctttattagttggcttacgatatgcttccgcttgttgaacggggacaatctcattcaccattctttcatatcctttttgctctaacaagtgcacttctttttcacctgtttctttttgttttcttgttttcataaggcttttcattttaaaattcttatttataaaacagaaaacatcgaaagatagttcatactcacagataatttatgtacggggcaactgctccccaatatactactataggcttgttcattccggtacggatttgagcttaaacttacatagtgaaaaaaatatctatcatgctatcatttatttttatatcatactaattatcagcgaaataaatatgatagatatatttctaaaaggcatctctcatacttataccaccaaaaacagggtatctctcatcaataaaatagtcgaataaaggtcggacaggcgtaagatggtttgtttttgttgcaatgaatccgtataaatccgacctgtatggcttaataatcccactttaatagcgataagtttatagcccacatatgtgtgacgaacagtctacatacgtgggctgtacagtttacaggtgcgggctgtacagcctacatatgtaggctataaaaagattaccgtttccaatggattattaagctgccaaatacaggttatcatcctataaagtgaatatccttgtggcttcatatgggtgtttttccctgattctacactaaaacggatgcagtagtggtatgatagatacccgttttttgcgacagaaacatgatagatacctgtttgaaaaattatctatcatacttattcttctgataattaaaacaatataaaaataaatgatagtatgatagatatttttttcattatgtagtatttaagtttaaatcgtacaattatcattcagctcatttctgtactggaaatgaaacaaacttttgaggtggttgccttgatttatgtacaccttaattctataatatataaattaactcctatatttgtacttttattcaacttatcctctttataaattatgaaagaaaacaaatataataatagccatttcttcagtcaatattctcaaatgtcccgttcggtagagggcttgaaaggagccggagaatggcatgtattgcagaaaatgctccctgattttgctgggaaaagagttttggacttaggctgtggattcggctggcattgcgcctatgcaatagagcacggagcaacacacgctaccggaattgatatttcggagaaaatgctcgaagaagctcggaaaagaaacccttctccactcattgaataccaatgtatggctatcgaagattttgatttccagccagattcttatgatattgtcatcagctcgctaaccttccattatctcgaatcctttacggatatatgccgaaaaatcaataacagcctgactccgggaggcactttcgtcttctccgtagaacacccgatatttacggcctatggcaatcaggattggcattacgaccaggacgggaagcctattcattggccggtagatcgttattttacggaaggcagacgcacagcagtcttcctgggcgaagaggttatcaaataccacaagacgctgactacgtatataaacggactccttcaaaccggatttgaaatatgcgaacttatagagccacaaccggacgaaagattgctggataccatcccgggaatgaaagatgaattacggcgtccgatgatgcttttgatctctgccaagaaaaaaagtaaagacgcaaagctatgagattcaaggcattgaaaaataatagataaaaaacattcgtttagctattgttaattaaaaaatactccctatctttgcaccgcttttgaaaagaacaacccttcaaaaaagtagcggggtgtagcgcagtccggttagcgcacctgctttgggagcagggggtcgtgggttcgaatcccgctaccccgactacaaaaaagagggttattaagttcaaagtttttcggggtgtagcgcagtccggttagcgcacctgctttgggagcagggggtcgtgggttcgaatcccgctaccccgacgaaaaattcaagtcaagaaaaattgaatggtgttgagctgatacagtttgtatcggcttttttcgtttatgtaaattagacacaattataccccgttttggggcaaataaagaggctatttctttgaactatctttgaacaagtttctctatttacattcgtttaggggaaattaaagtaatttcctatcaaataaccccgattcaagctgtttaatgcattttttaacctttaaaaaacattaaaacagtatatggcaacatttaaagcagttgttttccaaactggaagacacataaaactagatggaacatctaatataaagattagaatatatcataatagagagtcacagtatatatctaccgcttattatatccgccctgaaaacatggacgaatccggaagaatcttatcgggagtgacaaacggagaaatgatagaatacgaaataaatgcgtatatccagaagatccggagagaatatttaaaattggggcaagatagaacacaattcatgtcttgcatggatctcaaggaggaaatagaaaaatctctcgctcctgatgctgaatttatagacttcgtagaattcgctcaaaacatagtaattcagacgaaaaagaagaaaacagccgaatggtacagctcttctatcgatactctatgctggtacacgaaaaggaaaaagatagatattaagttaatcacctcattcctactaaataagatgataaaagacctgtatcaatcaggcccagcaggtattccgctagaacctggcacaataagccattatcttagaggcttaagagcattatacaacaaagccaaactctattataacaacgaggacttcgatatcataagaatacctggtgatccgtttaaaaaggcagagattccagagtatcgaagaaaaagaaagaatatagacatcaataccttattaagaattcgagatttccagtccgataaaagacgaactaatatggcacgagacgtatttatgatgatgttttacatgatgggggtcaacatcaacgacctttatagtatttcgtgcgaacgtcgcggaagattagagtacacacgttcaaagacgaatacggataaaaatcacgaacaggtaccactttccgtaaagatcgaaccggaacttcgcacacttcttgataaatatacagaagggtatttcctctcctactttcatactaactattgcagcttgaacaatttcatgcgtgcaatcaatagtgggctgaaagacatttgcttgaatttagagattgattttaaagttactactaattgggcgcgccacacatgggctagtttagcaagaaataaagccggagtaccaaaagctgacatcgacttctgtcttggccatgtgaacaatgactataaaatggctgatatttacattgatatagattatagtatttgcgacaaggcaaatcgggctgtattggatttattgcaaaaaaaagaagaaaaaaaagactgaaacgtttgcaaatacaaaaactctctatatatttgcaaacataatggtgttgagctggataaaacaatgattttatccggcttttgttgttcctatacaatttaatagcttttaattactgaaacctatctcctctttatgttatgcgccaaaaaacaatgacgcatggaaattacagtatcaaaaacagctttatcagataagctaaaatcagtcgggcgaattatacagcctaaaaactcattacctgcctatgataactttttgtttgttatagatgaatttggagtcattctagtaaccgcaggtgaagaaggtggacgcatctctacaaacatagatggtaccgcagacttcaccaattacactttcatggctaatgcaaaaacattacttgacggactaaaagagattcccgaacaacctttgattatatccattcttgaaaaggaattgattgtcaagtatgcaaacggtaagttctcaatacctattgagaaaggagatcaatacccatctatgagtacggatgataccgccagcccatttcttgtatcaggcaatgatttattatacggaataaggcaagttttgatctgtagtgccaatgatgaactccgtccggtactgaatggtatctattttgatatcggtttagattcaatgtcatttgtcgcaacagatggtacccgcctagcaatgattgagaatccatccgcttatacgcgcaaggaacgggcggcctttatcctgccgagcaagtttgctaaagtactttctaacattgttccggaagattgcatggaagtagagatatcggtaaatcagactaatattttatttgagtttgattcataccggttaatctgccgtatgatcgaaggccggtatcctaactatcgcgctgttattcctcaaaagcaaccaaatcgtgctgtattaaagaaagctgatattgtgtcagctttaaagcgcgtatctgtcttctgtgatgaaagttcgtctttggtagtcctcaagttcgattctgactctcttaaaattgcagctcatgatttagatttttctaagtctgcagaagaaacgattatcctgcagtcaggctgtaatattgaaatcggctttagaagtagcttcttgattgaaatgatgaataacattccttcggaagatattgccatcactatgagcgatccatcgcaagcttcacttcttacccgctgcgacgaagaagtaaaaagcttaacctatctattaatgcctttatcaattaataattaaagtcatgggaaaagagaaccaatcatttaaacaggttattcaatcttatttagagcaacgtgcaaagagagattccctctttgccacctcttttgcgaagcaaaataagaatatagatgaatgttgcaattacattataggtgaagctaaaaaacgcggtgggaacgctgtattcatgtctgacgatgaagtattcgggcttgcagttcattactacgatgaagatgatatcaaagttagtaagcaaaccaattataaggtatcagctggaaatgtgataaaagaagcatctacagaacaaccagaaattaaaaagcctgcttctgcccctaataagcgtaaagggatgaaaaagcaaataccttccggacaatttttattatttgaagacttatgaagccaagaacgaaattacagcttagagtagcaggtttaagtagccagctacctaatattgagaatatgatgattgactgggctaaaagcgattgtttaaaacatataggatatgcaaccaagacacgcgttatatgtatggaatgcgggcagcgcttctctccggaacctgtaaagcgtaagcgtgctatttgtcctcattgtggtgcatccttgaagatagaacagtcaaggaagcgtacagacaaacaatcgatgtttattgccaaagcggaaatttgtgaagaattccaagttatccgaagctttgaattgattgcttactatcaggcagaagcgaatcctcgttattttattcgtgagatactgcaacattggataaaagatgatggcaaccgggaggtagtagctcgtgctaacaatacgggatattgtggatggtgtggagatttggagatacgtaataaagttgttggatcatattattacagttgtagtaatgatgtttattgtgaacgctatcatccagcctccgtctttagacctaagtatattcaaatgggtatagattgtaaattacgcggtatgtcatttcttactgccaccattacaattccccattttcccaaggctgaaacacttctaaaggcaagacgttatgaattaatagattatttcgagggacaccgttacaagattgatatgtattggccgtctattaaaatttgccttcgaaataaatatcggattaaggatgtttccatgtggtttgattatctgaaactacttgaacattatcgtaaggatctgcataacgcccattacgtttgtcctaagaatctaaaaaaagcccatgacttgtatgtggcgagaaagaaacgtgatgatgaaaaagaacgcaaggctaaagaaatgcaacaattgcttaaactcaagaaggatgcagagaattatatcaaagaaaaatcgaagttctttgacctaaaaatgtctgatggtaaaatagtcgtagtaccgctcaaaagtcttgaagagtttcaacaagaaggtgaaatcatgcaccattgcgtctttacaaataaatattataaagaaaaggattcactcattctttctgctcgaatcggcaagaaacatattgagaccgtagaggtcaatttaaagacattcagtattgttcagtcccgtggagcctgcaatagtaataccgagtaccataaccgtattatcggactcgtgaaaaagaatatgaacttaatacgtcagaaactgacggcatagcatacaatgacctatatagattatataaaccaattttggaagatgaatcgaagtgtagaattcagcccgaacgaagtctttttgtacttctatctcttgaatgagtgcaatattcggggttggcagaatccgtttgaacatcccaacaagactatcgtcctcgcaaccggtatatcagagaagaccgtcattgaagttaggaacagattgcagcaaaaaggtttaataactttcgaatcgggtaaaaagaatgcaaaatcgccagtttattacttacttgacgaaagtaaaacggtaagtaaagaggtaagtaaaacggtaagtaaaagggtaagtaaaacggttaacattaaagataagactaaagacaataagacaatatctcccttacgcgtgggagatctgtttccggctgatagttttttcgacaagtctttggacgactgttatactgaacttaaatcaaatcggtcatgggcggaaacagtaacgatgaatactcgttcttccggcaaccctgatttcacgctagaaaccttttatgggtatctggagaagttctttatgaaattgcaaaatgaaggagaaacggcgaagtcgcctaaggatgcgatgtctcactttgcccgatggctgacatttgaacttaaaaacaagaaagatgaacggagaattaataaaaacaggactgcaggtggtgctaagaccgtcgcaaatagtccaggagacaatagtaaccccaaaggagttaactccgatacaacaggccttacagactggatcgacagcctctcaattggtcgctgaatggagtgggacaatcgcgcagttaaactgtaatgtcgcattatatgacgtggctaatgcagagcatatacctactctagcagacgtaaacaggagctttagcaactcaacatcgatagagatcattaccgagcatttgaaatctgtattgagatatgccggtgttgaattgactaatgcccagctagcggaaacagccttgtcgatactatccagctactggtacctgaatttagccgagttatgtattttcttctcccagttaaagaacggcagtcgcggacagttcgtttggggatcgaagatcaacaatcaagcaatcatggttgcacttgccgatttttgcaaagacagacgccgtgagattgagcatagagaaaatgaacttgtacgaaaaaaggctgaaactggctatgcgcgtaacgagaacttgattaaagatatcgttacgggagttcaaaataccagaagagaacgagaaaaagcaaaacaggatttcaaggccttctgtgagctatttccatatctgcctgataagtatgagcccaaggtactttggaaagcatggggaggcaataaagaggctctacgtaagatttacggtgaaagtactcctccccctgatgtaaccgaaatggatatcgggatgtatttgtgtaattacaacattgccaagggtaaagagttggaaaaataaatgcggccggcgtaccaccaccgaccgctttcataagtataaagctttgtattgctattaggaacagcaaatatataaaatctttgtgcttatggcaagtgaagcagtaaataattacataactaaacgctacgaacgctggcttgattactctttgtatcattgtgggcttgctggtatttcagacgaagcaacagacgtcttgaatgaggtcatttgttcgctccttcaaaagaaaagcaggttactggataaattacttgagacaaaaagaaatggctatacagagcttgatttctttgttttgaagatgataaagctaaacgcatcctctcctacttcacagtataggagtagatacaagcccctgcctgtggatgataatgtagattattccaggctagatattgaggatatttcagatgaatcagaagatcgaaacgctgaaatattagacaagctgcacatagtaagggaaacattcgaaagtctaaaccttggtacgacagctacccgcatttttgagtatcgtttcttccaggatggcaatttctctgaatgggaaggtccagagacattgaagcagctatatgagatatataacggagtgcaagaacttattagaaagaaaatagccggggagtctatattttagtgaaaattccttggtcatggaagaaaatgtagaaattaagattgatccccggaactatcgtatccatggggatgaaaacaagcggcttatccacaaaagcctggttgaatgtggagccggtcgatccgtattggccgaccgtgacaatgtgttaatcgctggaaatggcgtgtatgaggaagctcaaaagttaggactcaaagtacgtattgttgagtctgacggtaccgagcttattgttattaagcgcaaagacctatctacggaagatgaaaagagaaaactgctagctctagcagataatcatacttccgatacttctgaattcgattggaagttagtgatagaaaacttctcgcctgatgtattgaatgattgggagttttcagtagacgagatcgaactttcgactgatatccataattctgacgatgagaaagataataatctttatacaaaaaaaatagtatctccaatctacacaccgactggcaataaacctgcaatatcagaactctataatcttgaaacttacaattgtctgatgaaacaaattcaggagtgtaatttagacaagcagactaaagattttcttcagattgcagcttcaaggcacattgttttcgattatggaaaaattgctgaattttatgctcattcaaacaacatcattcaaaatttaatggaaaattcagctcttgtcattatagattttaataaagctattgaactaggatatgtttgtttaaagaaagaattgtcagactcatatttggaggattatagcaatgatgaaaaataatagcttcgttgcattgatacttacacatgggcgtcctgacaatgtacatacagtaaaaacattacggaaatgtggctatacaggtgatattatcatagtattagataatgaagatccgaagatagatcgttatcgcaaaaactacgagaacatatatgtattcgacaaaaaagaaatagcatcagaaacagatgagggtgataacttcaatgatcgtcgagctattatttatgcgagaaatgcttcttttgaaatagcaaaagaaaaaggctaccaatattttattgagttagatgatgattatacggaattctcatacacttataatcaatatggtgaaatgaagcagaaaaacattatcaatcttgataaagtacttgatgctctaattgatttcaaaaataaaacaggtgctttagctgttgcattagctcaaagaggagattttatcggaggaaagcagaataatatagttcgtggtgaattacttaaacggaaagcaatgaactcatttatttgtgatacaaacatgccttttaagttttttggtaaaattaatgaagatgtaaacacctacactttactaggaagtagaggaaatttgttttttcagattccgcatgtgtctttgaatcaagtaacaactcaacaatcaaatggcggaatgactgatatatatttagatagtgggacttatgttaagtctttctacacaattatgtatgctccttcttgtacaaagatacgcccaatgggaagtgtgtatagacgcctacaccatagtattaattggaataatgctgttcctaaagtaattccagagaactgtaaaaagtaacccctatttatattttaatttgaagattatccaagctaaggcaagagttatcacaatttgttagttattgttagtttatgacagagaagaagaatctggccgagaagaaaaaaagagggcgtaaatcagagtacagaatagagtatgccgatcaagctctaaagctttgtttgttgggtgcaacagataaagagctctccgaattcttctctgtttcagagcagactttaaacaaatggaagaaggattatcccgaatttcttgagtccctaaaaaaggggaaaaatatagcagatgctaacgttgcatcgagactctataaccgtgctattgggtataactgtaaagcaacaaaatttgcaacatcgaacgggaagattacagattcgaaggaatttatagagcattatcctcctgatacaacagccgctattttctggttgaagaatcgacagccggaaaaatggcgtgacaagaaagaagtagacgcgaatgtaaaccttggtgatgaattggaatcattgacagacgaacaacttcaggctattattgatggtaaagaaaaagagtgaaagagaaatactgcttagacaagcgaaagcagcaactatacttcgcaagcgtgaagcccggaatgatttctgggctttctgcttatactatgatcctaagttctttgccaaacgattattcttgaagaaagtagccgaagcgttcatgcgtgtgtatacctcctatttagctaatattatctatcgccttgctgtcagtatgccgccacgtgccggtaagtcttatatttcctcattgtttatagcctggatgtacggtcacttcccggaagaatctgtaatgcgtaactgttgctctgatactctttacaataagctgtcatacgatacccgtgatattgtaaaatctaagcgttacaaagagacattccctgatattcatctgaaaggtgataaacagaatgtgaagagttggaatgtggaaggcgctcgccaggtatcttatttcggtggtggtgttggcggcaccgtgatcggtttcggtgcatcaatgcttgccatgaccgacgacttatacaagagcctggaagatgcgttatccgacaataataacgagaaggtatggtcttggaaacaaggtacgcacgattcacgtattgagggaagctgctgtatgattgacattggtacccgctggtcttctagtgatgtcctcggacgtatggaagaagccggcaagtataatgaaatcatccggatcgcagctcttgatgaaaacgatgaaactttttgcgctgatgtacatactacggaatattaccgggaactacgttctgaaaccgacgaaagcatttggatggccgaatatatgcaggaaccattcgaagccaaagggttactattccccaaatcgtctctcatgcgcttcaaattagccgatattgcaggaaagaaacctgatgggacactcggagcttgtgatacagccgataaaggagatgatgatttctgcgcaccattcgcaaaggtgttcggaccaaaatatttcattaccgatattcttttcacaaaggatcctgttgaagttacagaaccgcgcctggcacaaatggtaatagataccgaatgcgaccagctacgcattgagtcaaataatggtggtcgtatctttgctatcaatgtgcgtaagcttgttacatcgaaaaagaaatcgtgtgttatacaagcccggccaacaacccagcacaaggaaacacgtatcattatgaaggctggctggataaagaaacattgcgcttttcttgatgaatcagaatactctaaaggatcagactacggtcgtttcatgaaagcgcttactagttataaacgtgaaggtgataactcacatgatgatgcatcagacggaatgacaatccttgcagagtttgcagaatcacttggcttgaaatttaaagtgtctactcgtaaggtggggcgcggatagcttgattaagattctaatgtatgtaattcttctgtaagcatttctttcaaagagaatactgtccataagcaaatggagaaaaacatagatatagatattatgtcacctagtataaattcaaataaagaacagaatataggtagtgtaattccaaatataagcaaaattaatactatatgaattaaccttttgagtatgcgtggaagtccttgatttaaggttaattggagcttatatacattaggtattatctcttccattgcttggtagcctaattttataagaaatttatcattaaaggacatatcgaaatatctctctttatctattagcaaactgatttttaatatttcttctttgatagttgaattgattttatccaaatgtataaattccgaatattcgttttttttattttctagataataccaaaaaccatttccacaattattctctatccatttttttaagatttctggagaataataataatttttatcaaactcggtatatattgtaggatcaaaacttttggcactaataaatgatttcaattctaaataaaaaggctcaaatcctcttctatttttgtcggcataatatttatcagcttctgcattttgagtatgatctacatttaagacttcctgtatatcaaagaaagtcacttttggatgtttggctacaaagtcatttacatctttattagagaaaaaacctgaatttaataatttattaattatagctctaaatttatgtagcttttgagtgtacttcacataatcattaaaaacacgaattcgttcttctcgtgtttggatagtttttgaaataatgtaagtaattagaagaccaaccaaaaccccatatactgtaattatataacctctaatttgaataatattttgcgtcattctttcatctacttgagacaataaaagaaaaattgctgttacccctataaaaagaatgacacataaaatcaagttaaacttatcattgattatatttaaatatttatcaataaatgctcgtatttccatattacaatttattctattgtgcaaatatataataactttataaaaaagagagagcggatcttatattttaagagaaaagtatatgccagacattaaggatattctaagaaatgaagatttcggtagcatagtaggtgatttatgcgttgatacccgtgaaaatcgtaatcctcgtgagtatatggaggaatacaatggagacagaacccgtcgtaaagaatctgttgggtatcgggagcctaaaaagattgctgtatattcagatacagaagtagaagttgaccccgaaacaggagccgaaaagccaaagagactagaggataaaactgtagaagtcgctcaaattgtgactaatctaccaaagaagatagttcgtacctctgttgcctttttgtttggtggtgaaatgactatcacagctgaagaccccaataacggttttaccgagtttaagaatatctataagcgtaaactcaaaatgcaatcagttttgaaagagtttgctagaaaagttctttcagaaaccaaagcagctattgttttctatccagttacccgggatgatggaaaaagccaattaaaggttaagattctttctactcctaaagataacaatatcgaatgtgaattctatccacatttcgacgaggacgacgatatggacggctttatctataaatacaatgcagaagtcaatggccgtacttgtgaatgcgtgaagatatacacgaaagatgttatctattccggagtaatggacggcatttggctagtgaaaaagacaaaaaacctctttggaaagattcctgtagtatatgccgaagtagattgccctgattgggaagatgttgccaacttgattgataaaaaggaaatgaggctttcccgcctatcggacaccaatgattatttctctgaacctatactgaagacttacggactcgccaacctcccaagcaaagaaactgttggtaaagaactaaactttactatggaagtagatgcggatactggtacttcgtatcatggtgatgctgattacttggcgtggcaacagtcttgtgaatccgttacacttgaacttaaccaactcgacgattcaatacattccggagcttccagccctgacctatctatgagtaagttaatgggacttggcaaccttagtggtacttcccgccgttttatgatgattgatgcagaaattaaagccagcgaacagatggaaatattcggtcctgcagttcaacgtactgttgctatcgttcaggcaggtatggctaatataacacatactaagtatgcatcacagctaaatgataattttattgaggtggagtttggcagtattctcccacaagacctggcagaagaacttaaaaatcttgaaacagcatcccaatttaatagcaaagagacaatcattaaaaattcgccatatacggataatgttgaagaagagttggcccgcaagaaacaggatgagaaagatacagctcaaaacaactcattcctaggagctacactttaactatgcctggactttctttctacgataaacagcatatacagaaagttgctgcacagcaggccgtaatagccaatatctttaatcagtttatactttctgtttccccgtatctccgtaaatggtcagatgcggggaaaaacaatgtatggatacgtaatcagagaatagagagtgcagttgaccgggaactgctgaatcttgaatcaatgctatatgctaatatctctgcatttcaaaaggacggttgggaacgagcagaaagaaagaatgatgattttatttcccagttcatcaagggaatgtctatttccagtgcaacgaaagatggaatgtttactcatagtctatctgcatttgaagctctaaaaaatgatatagacgctaacggattcaaattatctgataggatctggaatattacacagcagacgaaatcgcaactcgaattctatcttgatagcggcgtagttgccggacgtaattcaaacggaatcagtagtgatatacggcaaattttgcaaaatccccaaaaacgctttcgcaggatccggaatgagaaaggcgaattagttttgtctcaaccgatgaaagattaccacccaggacaaggcgtttatcgttctgcatataagaacgctctccggacatctgcaacaactacgaacacagcttatcgtagtgcagactatgaacgttggagtaaacaggattttatactaggaattgagatacagcgttcggccaataatcgcggaccgtgtaagatctgtgatgcgatgattggaaaatatccgaaaacgttcaaatttacaggctttcatcctttttgtatctgttttgctactcctatcaccatggaaccggaagactttgctgatttcttgctgaatgacacagttccgcaaggtcaaactattacggatattccccaagcgacaaaggattttgtcagcgagaataaggatggatttcaatcggctttctggtataaggataactttgccaatgatggaggactacaaagagaaatagtttcccaacctattacgaatgaagttataaaggtttctaaacctaaacgtatcaagactgatgctgaaattacagatattaaacaaaaatggaatgaacgaaaactctataacaaaataaccaacacagagaatgaaatacgcctgaataaaagctttgaaacaggagtcttatttgacaagaatggtaatgttgtaatcgataagcgcggagccaaatatagtgttgagtttacggatgaagaatgtgcgaaaatgaaggattgcatttttacacataatcacccaagaggctggcaagagccagaaaagagtttgggacgaattggcaactcattcagtccggctgatatgtatcttgcaatagcccataatgtatcagaaatgagagctgtaacacctaattatacattcgctatgaaacgtcccgaagaaggatggggaattacaattagtaaattcgaaaagctagtgaatcgggagaataacaaactaagagcagagtttactgctagaatcaataataatacactatccccaacaatggcttcagtggtccattatcatatattatggaaacggatatccgaaaaaatgggatggagttatacaaaagcgaaaactcgttaattgaattcttttaggaagacgaactcccctttttggtcgctttctcttttgtcatgtacctgtgaaccatcaaggtatttaacaggaataccattagggtatgccgggcattttaatttatcaaaattaaaatgcttgcattgtgtacacttagatatatacacattgtaatattcatgtctatcttctatataatccattctacgctttaacttaattacaaatgtatgcatttgattctgaaataaaatatataagcaggaaaaatttactcccaatatattttaaggaaaaaagtatgaagattttagcaaccatcaaagcagctttgaaaaaagctggaattcctgaaaagtatgcggccaaggtgcaagctcttttcgacatcgaaagtgaagagaatctggataactatattgggctattcaaggataatattcttccggacttggtatcaaatgaacaaggcagtcaagccagtattgatgctgctattgccgcttatgagaaaaaacacggtttgaaggatggaaaacctattgagacaactaagactaaaaaaacaaagaagccgaaagatgacgaagaagatgaagacgaggacgaagatctcgaaggcttgcctgcttctgttgttaagttgttgaaagcccagcagaaacagatctccgagttggctgcatctgtctctactgtcgctacaacagtcactacttctacgaagcaggcatctgctaaagcattgtttgcagattctaaactccctgcaaaatggtttaatcgtattgatgtcaattctgaaacttctgttgaagaccagattaaagagcttcaagaagaatttgccgaaattaaacaatctgttattgatgatgaagtcgccggtggtgattacaagcctaattcctataagcccaaagaacgtaccgaacaggaatggttaaagttaatggaggatgaggaaagctctgataatggcactgctagccttggtctagaagaataattattaatattaaaagctatgttcagaaaaaaacaaagtgaatttcagtatgctcctggtatcgaaaagattatcgaggacattcagggcggtggaactattgcccgcgcggaactgaagggaatcatcgacgagcttcctccgcttgtaattgtgggtaaagatgctaatggcctttaccatgttgttaaaaccggaaaagttactgctgtcgcggctgccgatgctgttgctattcaaatcgcaaagaatcatgtgtttaaagttggggaagctgttacaatcggcggtgctttaaccggagcttctgatgtaatctctgcaattgacaaaaccaatgcagcttatgacacaataactctttccggagctattggagccgcaaagattaatgatgtcttagttcttgttactgctaaagctgctgccaaagctgcaaagttcaagtataccccggaggttatcaccatgaacaaggttgatgtgaccgtagctaaccagcagtcaggcctcttggtgcgtggtactgttaatgaagcagtaatgccctaccctgttgacgacgctattaaagcattgctccgttttatccgttttgtctaatccattaaaataatgatatatggaaagaagtttaattaaacaagtgaaccgtaaaaatatgggtgctcgccttaactcacgtaaggttaagccggtattcttccctaattttttcggtgtaaagcaaaaagattctctgaaatgggaaactttgaccggagagaaaggtgctcctgttattgcagacgttatcagctttgattcttctgcaccgcaaaagaaacgtgaagttgtaggtaagatgtcaggtgatatccccaagactgccgttaagcgtggtatgaatgaaagcgactggaacgaataccggcaacttagccgtgattgtgaaggtgattcggatttgaaatctatccttgacctcgctttcaaagatcaggactttgtatataacgctgttcgtggacgtttcgaatggtggtgcatgcagctgatgtctaaaggtgggttcactctaaactcaagcaataataacggtattgttaccgaggaatttgttggttgtggtatgaagaatgaaaataaaaaggtttctgctgctgactgggcaaatgcaaacactgcagacggattgcaagacattgaagatacagtagtttctgcctctgctgatggtgttaccattaagtacgtagtgatgcgtaaagatcgatttgctttattgaagaaacagaaagccgttatcgagaaagttaaaggctggatcaatcagaaagaaaagctgactatctccaagaaagttatcaatgaatatctctctgcacaagagaatacagaaggtgttcaaattgtcttagtgagcccggctgttcgtattgaagatgcttctcataatcgcactacgatcaatccatgggaagccgctaatatctgttttttggaagatttacaatgcggtgacatccaacatggtcctattgcagcggaacattctgtcgagtacaagaagaaagcaacaacactgaaaaaagactttgtttttatcagcaagtggtctgaacttgaaccgttcaaagagtggactaaagcagaagctaatgccatcccggtagtcaacgatcctgatgcaatgtatatcatgaaaactgatgccaaggaatgggcggccgatgaagatactgaaaaaacagatgaagagtaaactataatggcaacaatcagagaaacaatactggaatatccatctattggggatatggaaggcttcttggataaggtagtcttcgttaggcggggtatcaaccccgaagcggaatgtactactgaaagcatgaagcaagtcggtctttgtgtcgctgatatgtatgccatgatggtaaactctcaagatttcagtgaaaacaagctttctatcactcatccccgttctttctatattcagactgcaaagcaactgtacatagagaacggggagccggagaaagctgctaaacttgggaaacgaatcattatcaaagggagagctggcaacagatggtaaaacggtatccacatacagcaatagttactattgaggctaacgggcacttagttaatggtgaatgggttcctgggaaaccggttgaaatatctgtccccggacgctacgacccggtaagcgatggaagaattgttttaaaacacaattcggctggtgatgaaacacaggtacatggctatttctactccaaaatgcaaccgccagcagatagtaagtttttgcgtttgaaagttgcatcaaagggtattgatgtaccggttatctgttgggaaccttatcaatcacattcaattatcaacgtatgaaaaacggcatgactcccctattcacctttgatgaaatggaacgctggttcgaccattttcaaagtaaagcagaagataagatgcttgttttcctgcaagcaggaggtgaaaagtttatcgaagtagcccgccggagtggctcatataaagaccagactggtaatcttcgttcctctatcggatatataatagctaaagacggtgaagtggttacagagaacttcaaagaaggagacaaaggtactgacaagaccaccggtaagtacaaaggtcgtaggcttgcagaagaagtctcactgtcgtatactggtggttatgtgttggtcggtgttgcaggaatggaatatgcggcagccgtggaagctaaagggtatgaagtcgtttcaggtgcgaacgttcaatgtgagaaatatctaagggagacattgaagtctgtttttagtaaaatttgaatatggatgaatttgacgctgtagatatagtttataatgctgtggccgctgcgggcaccgatgttatgatttacaaggacaaatcggaagcaggcttgaccaatgaacatatcgttatcaatcatctgcaattgaatgaacttgactttatcaataaagtgcctgttaacatcaatatcttcgtaccttggagtgatgagaatggtatgttaaaacgtcaacgaatgaaagaattaaagcgtaaggtgcggaagtcgcttgattcaatcaatagtaatgacggtgtatgtaaagaagtgacagttctctggagtgttccaatgccggacttgaaagagaaattcgcttgtacaaatattagattagaaattttaatagatcaataattatggcaggagaagtaagacctatcgctatgggcgtaggtaaaattaaatttggaacagtcggtgacggcattcccggtgcagatctcaaagattatccccttccgaccaaaggaagtgttgcattcaactttgcagatcccaaagaagtaaaaattgaagtggaaggcagtgaagaacctttttatgttgaacttgtgaaagatacgacagattatgtcgagttctccatccctactccatcaaatgaggttctcaaagaactggcaggcggtgaagtagatacaacaggtggaaaaaacatctggaaaaagcctcttaatactccttctatttcaaaaacgttccagtgcgaaacattacctaaaaacggtaagaaggtcgtttataccatcgtgaatggtaagatcgcctcaaagatttcgcaggctcccggatcagaacaagcagagttgttgcttgttcgtgtatatatgcaagctgctgttactgtagacggtaagagacagaccgcttttatgcgcgaagtagttactattgccgaaggcggagaagccccagctaatgcagcgaatgtcgaaagcggagaagctgctccaagtggtgcgaaaaaataattaacggtcctgtatagcttaagttggttagagcgctacatttattaagtagagaccggcggttcgattccgtctacaggaacaaactattgaaggatggagctgaaagtattgaaggttagttgcaaataaccggaagtattgcccggaagtacaacgggctaggctccttgaggaaattatgagtataaagaacttatttcagcaagaatcggaatctgtaacggagcagcctgtcaagattccatttgattttactaaccgagattctattccaaaaggaaaggatcccggtgattgtattgtaataaagcctatcactgtccggacatggtttagaattcgtccgcttctccttgaaattgaaaaggaagatattgataaaatgattgtgaaagatggtgagctgaatgctgattttccagaattgatgaataaatatggaggactacttctcgatgtcgtttgcctgggcattcataacaagcctagtgatccgccggcatggtttaaaaaagccctcattgacaatacgacatgggaggatatacgcatattattcaatgcaatcatatatcgcatagggtatcaccctttttgtacctctatcacgatgcttcggaacgtgagcccgctacgagagacggagataatagccgctcggaagaatctgcaaagttggaaggatataaccaaagcagattcttagttattgcaaaagaagctctaggattaacgtttaatcagacgttggatagtagctatggattaatagagatattgcttcaggagtactcatttgtgatgagacagcgtaataagacgactgacgaagacggaaatgttgaagggcaagattacgagtgggtagaacttccctctttcgatgatcctagtaagacggtcaggataaagaaatataatgatattgtcggaaaggtcaaatgataaggtaatttgctactgtgtttatatattaggttaactgtttttttataaattggtttagagtattgcgatcccttgtatctgtgaagatataggggattattttttaatctcctgaagcttctgattgagagatgtattatcccgctgtagattctcaatcaatcttttctgataagcgagcatcccttcaattcttccttcatccttgcccttcttgtaagcaacattaatttcttcttctgtgtagttccttttattcgctacagatacgttctcattttccttggtcatggcgctaatgaatagtaatttatatattatagaaaaaggctatctctcccctattctttccgaccaaggaacataatctttcattcacactagggattatgtagcaaagggaattgatagcctatattgtgatatagtaggcttgtcaactccctagagtaaagtaaaaaattcgttccttggtcttagaacactgcaaagatgcttattcttctcgaaatagccaaattttggctcctctttatattttaagaataaatgctatatgggtattcagaacaaagatggtgcgttatatttcgctacaggtatagataattcagggctatattccgggcgtcaagaagcgatgggaatcataaaggcaatggtcggtgaaattaccgcttttgatgtattcggagggattggcattagtgcgggaatcgcttttactcaagcagccaaagaagcatataacttcgaaaagcagttccagcaaagcatgaaagaagttgctactctttcaagcgggataaaaggcagtcttaccgattttatgaatagcgttattgatatgactagagaggttccagtcggagccgtagagtcagcgaaagcactatatcagattgtatctgcaggacatgatggagcggatgctatgaatattctaaaagtatctgctaaggctgctatcggcggcgttacagaaacggctacttcggcagatgctatcactacaattcttaatgcatataaaaaaggagcttctgaagcagaatctgtttctgatatgttatttaccacagccaagcttggtaaaactacaatgggagaacttggaaagagtattgctcaagctgctcccattgcctcgtccttcggtattgatattgaagacgtgctagcagctgtcgtatcaataaccaaacaaggtgttccaacagccgaagcgatgactaaaatacgtgcggcaattatgggaacggctaaccatttaggtgatgcagccttttccggacgttctttccaggaagcattacagctgatctataacgaagcaaacggaagtactacaaaaatgaaagaattattgggtaccgacgaagctttacaggctgcactaatgataaccggacaaaatgcagtaggtgctgcgtccgatctggaacaaatgaaaaatgcaacaggtgccgcagaagctgcttttatagaaatgtcctcatcagccgagaatcaaatgaagcttcttggtaataatataacagctgcccttcgcccgttaggaaaagaaatcttaaaggaaatatccagtgcagcgcaatctatgaatgaagcctttgctgacggaagcgctcaagaagcattgaaagaaataggagcattaatagttgttgttacgactgcccttgcaggatacaaaggcagtattcttgctgtaagtactgctaagcaagtatatgcaacggtaacagcaattgtaaatcgacagcgtgctattgaggccgctgatttagtcctaaagaaaggcttgtacgctattgaggcaacaatgattgcaaagaatacatcttctcgtatcttattgacaaaagccctcaaagctcaaactattgcacaactaaaaaatgctgctgcaatgttaactaatccttatgtattagcagctgccgcatttgcagggcttgggtatgcaatttacaaatgtgctacagcagaatctgtctccgaaagagctataagaaagcataatgctgctatggagactcaaaaaaaacattttgatgaattgaaaaataaggcagaaagtcttgtcaatattataagagatgaaacatccagtcaatttgataaattaagtgcatacaaacaacttcaatctataatgccaaatgttttaaaaaatcttgatttagagaagattaaaacaatggagctccatgatattttaaaactactcaacaaagataaaaatgagcaatatgtaatggggattaaggttagagctgttatgaagcaagaagaacttgatgcagctaccgctgaatggcaaaaggctatcgatgaagctgaaaaaaacagaaaagatggtattgaagatccaggattaagtataagaattggacgattagccaaaaagaagaatgaagctgcagagtctgcccgtcttgcaaaagaagaagtagagaaaataaatgaaattcagaagaaagcaaaggaagaacaaaagaaagaagaagaaaaagctgccattcaaaataaagccttttggacaaaacaaaaagaagatgctactaaagcattggaatcaatcgcttcagcacaaaagaagcaaatggatgccggaaagttcaaagggatagattctgctgtggtaaagtcttataaagaaaatgtcaagaagctaaaggaggctgaaaaagaattaaaagtctatgattcatcttccaagcaggacgaccaagctcacaagctccgagaagaacaggagaaatataaactcctactagataagcagagcagagagcagcagcgcatgaaagaagactctgcaaatgaactcgaacaacttgaaatcaacaagctcaaagaaagtagtgaaaaggtccttagacaaaggaaactcaatcataagctagagttacaggctatcgatcgtgaagcagaggataagaaattacaagaaattgaaaaagctcgttcagcttttgaagctaatccacaaaataaaaagaaaaccttcaatgcatcagcatatgtcaagtcagagccagtaaagaaacagtttgatgcatttgataaagttgctaatgaaaaaaaggaaactacagatttaaagtacaatcgtggggatgatttagctgatttgctgaatcagtatcaagactatacggaccaacgccttgctattgaacgaaaattcaacgaagatattgccaccttgcaggaacaacgtaagcaagcggttaagaatggagatacagaacaggttgaacaaattgatcggtctattgctcaagcaacaaagaacaagggaatggaattgatgggcctggattacgataagttgaaagagtctccggagtatgttcgtgcatttgaaaatctgaaagaaacgtcttctgaaactcttaattctctgcttactcaattagagaatgcaaagagtacggctgccaaagttctttccccggaccagcttcgcgaatatactagtactattcaatcaattatggatgaattggattcacgtaacccgtttcaatcattatctgacaagaagaaagaattagcagaagcagaggaagagttagctaatgcgcaaatggaattagagaatgcccgtcagactgccgaggctgtcaagggtggagcacaaatagagaatggtgtcaagtcctcaaaattcaacgaaaagactggtaaaattgattccacaaaagcttatctgaccgaggcacaggctttggataaagtaaaagaaaagacttcgagatacaatgaggcgaaagataaggtagtacaaaaggatgcaaaggtaaagaaagcagaaaaagacgtaaaagcacagttggatgaattatcagacgcattaactgatgttggaaaatcaatcggtggaccggccggagagattatttctttaattggtgaaataggaacctttgcattgactgctatgagtggtgttgaaatggcagcagatacatcggctaacgctatcagtacagttgagaaggcatctgttattcttgctgttattaatgccgttatacaggtagcaacaaagattttcagtatgttcactaaggacgatacgacagaaaaatacgagaaagcgaaagaaacgtatgaatcctatattaatattcttgatcggataattgagaaacagctggagttagcggagaccttgacaggagataccgcaaacgctgtttatgaagctgctattgccaatatcaaagaacaaagcgcaaatgcccgagtactggggcaacaatacttaaattctggtgcttctggaaagtcacactcaaagggttatgatgaagtagatgatatgtccggtgaaggttggaaacaagctgcagaggcattaggcatgtccgtaaaggaatttaaaaagaaaatgggtggtcgtatgactggattatttgatttgaccgatgagcaacttgcggaacttcaggaacatgccggtatcttctggtctcaacttgattcagacacgcagaaatttgcagatcaaatcgcaaatggtgtcgggcaggtagcggaggtgctggaacagcaaatagctgataccacgcttcttgattacagctctcttcgttcagactttcaggacttgcttaatgatatggacgccgattctgccgacttcgctgataacttcgaggaatatatgaagaatgccatcgtaaattctatgcttaaagaagaattcatggacagcttaatggcttggagagaaaaacttaacaatgctatggatgacggtgtgactgaagatgagtataatgcactgaaggcagaagggcaacagctctctaatgaaatgaaagcaaaacgagatgcaatggcagaaatgttcggctggaatgataacgacgatgagcgtgaggcatcaaagaaaggatttgcttcaatgtcgcaagattcagccaacaaactagatggaagctttgctgtaatgacttcgcatacttattctataaatgaggaagttaagagtattaattcaggaacagagaaaatagcagagaaactgtcatatctaataaatatggataagaatatggctgaaatgcttcggggtaatgatactattgtttcccatttatcggatatctccaattacacatctaaccttgtggaaataagagagttcatgtacgctgtaaagctgggaatagacacgttaaacactaaaggtataacattaaagcgatgaaagggcaattattgattgacggaatagaggcatataccagcttgggtatatgtgttacaaagggaagttataataatcttgtagcatttcctgccatgaaggaaccagataagaatgattggccggaggaggatggacaagaattcgatctttcttgtcctgcattggatacggccgaagtaagcattgaatttgcgtatataggcagtttgggtattggtggattgattgatatactttctgacttaagctatcatgaattttactttcctttcattgacaggagttataagttacgtctgtcttcccaaagcagctatgttattaatccgagccttgaagttgctaaatttatttttagtaacgacttcccccgagaagtcgattacgaataccaggagcccgtaaatgagcttccaatgcctaaaggttacgagattgatgacaaagacttatccgattatggcgtagtcgtattgcaaggtagtaatgctgaaatactaaaggctccgacggtaaaaaagaacctattacagaatttcaagcgtcaagacggagcaatctacgatggtgaagttgtgaaatttcagacgaaagaagtatctctcaaatgcctaatgcgtaccagaacaattgaagcattctggcgtaatcacgatgccctactccatgatctcacaaaactgtctgccaaggtcgatgatgaaggatatgagtattccgatgcggaacgtatattttattgtgatgaatggagtgaaagctatccctgctattataaaagttgtcagacgaatgatttcatgctaaataacggtgtatggtgggagttcactttgaaactcgtatttaccagcttccggatcggagaaacggagttcttgctttcatccgaagcgggcgaatttatcataacagaggacggagagttttatatagatttaaattgatttgctatgccattaaagaagaaaaaaatatcagaactgaacgaagccagcgacatgaaaggcttcttcactatcggctaccgagtaatcaacggagttaagactagccttaaatttggtttagagaagattcagactgccttggataatatgctcaaggctacgagtgatgcaaaaacagctactaccgatatgaggcagttagaagccacagttgaagagaatgaatcgactcgtgaaaccgctgaatcccgtcgcaatgcttccgaacaatccaggcagacagccgaaacgaatcgttctcgtgaagaacaggcacgggaagcagctgaatccgttcgtatcactaatgagaatgcacgtaaaaccgctgaaagtggacgctctactgctgaaactgcacgggataatgcagaaaagaaacgtgttactgacgaaggtacacgagaatctaacgagcaagctagaaagaatgccgaaacaacgagaggcaatgccgaatccgaacgtgtggctaatgagaatgcacgcaaatctgccgaaacttcccgtgtctccgaagaagataaaagaaagacttccgaaacagaacgtgttacggctgaaaccggacgttcctctgctgaaaatatcagaaagcaaaatgaagatgcgcgtaagacagaagaagcggcccgcgtaactgctgaagataaacgggtaattgctgaatccggacgtgttgatacagaagctaaacgtgtgtcggatgaacaaacacgtaaaagtaatgaagatgcacgtaagaccgctgaaacaggtcgttcttctgctgaatcggaacgtgtgaaggaagaagacaaacgaaaaactgcggagagtggtcgttcttccgctgaatctactcgtgtttctgccgaggataagcggaaaacagatgaagcgacaagggaaacgaatgaaacctcacgtgtggctgccgaatctaaccgtattaccgtcgaatccgaacgtgtatctgccgaagcagcccgcaagtcagcggagacaggccgtgactccgaagaaaacaagagaaaggctgctgaaacttcccgcgctacggctgaaacttctcgatcatccgaagaagataagagaaagcagaatgaagatgcgcgtaaaactgcggaaggtactcgcggatcaaatgagactaagcgtgtaaatgccgaaacggagcgtgtcgaagcagagtctcaacgcaagtcagagtatgccggtattgtgcaggaaatgacgcaagcaacagatgaagccaccggacagattgctcttgtcaagcaattaacagatgatgcgaatgccgctaagaacgcatctgttgaacagacggctcttgcaaagaaagctacagatgcggctaatactgcggctggtagtgttaatgctgccaaagatgctgcaactactgcggctgcaggggccaatgctgccaaagctgaatcagaagctcaaaccgccttagcgaagaaagcgacagatgaagcaaatacagccaaggatgcatctgttatacaaacagggttagcaaagaaagccacggacgatgcgaacgctgctgcattggcggctaacaatgcggtttcaggagttgacgcaaaagtgaaagctgcagttgatgcactcgttgccggagcaccggatgctctcgatacactgattgagttagcgaacgccctgaacaatgatccgaactttgcggctacaatggcaacagagttaggaaagaagctcaatatagctgatattgttaataatctgacaagtggagggactaataaagtgctttctgccgaacaaggaaaggcattgaaagcagctttggactcccataaccatgatagcagatatgaactgataatcactaaactgaccgcctttaacaagaatttcggtacgactgccgggactgtatatgagggtaacgattcgcgtttgagtaatgcacggcctccattagcgcatacgcataaagtatctgaaatcagtgattttccttcttctatgcccgctagtgacgtatactcttgggcgaaggctgcatccaaaccaacctatacagcaaacgaagtaggcgcctctccatcaggtcacaatcatgctggtacatacgaacctgcatttactaaaaactctgcttttaataagaattttggtagtgccgacgggactgtttgtgtgggaaatgatgcacgtctaagtgatgcccgtacaccgaaagcgcatacacataaggtttcagatattagcgatttcccttcttctatgccggcaagtgatgtttcatcgtgggcgaagcagccgaataaaccttcatatacagcttccgaggttggtgcttctccgtctaatcacaaccacgcaggagtatatcaaccggtcggaagttatgcagcgagttcgcatacacacggagcaacggatataactccggatagtactcaccgctttgttaccgatacagaaaaagagacctggaacagtaaggctgcgggaaaccataatcatgattcagcatatcaacctaaaggtagctatgcaccatcttctcataaacatgtagcaaccgacattacggacgattctacacatagatttgtaacggattctgaaaaggctaattgggatagtaaggctgcaggaaatcacaaccacgattcagtataccaacctaagggtagttatgctgcaagttctcataaacatacagcgacggacgttgaagaagattcgactcatcgttttatgacggatgcagaacgtacaaaacttagtggaatagcctccggagctaataattactctcatccggtttctcatccagcatcaatgattgaagaaagtactacaagaaaatttatgactgatgcagagaaaactttactaagttctctcggaactaatgcaactcaagtagctagtcaaaatttgggacaaaacggatatgtcaagtatagtaatggcttattaatgcaatggggaacaagagctggagcaacggggacaactagtctgtatttccctaccagcttctatgatactaattacaacgtttatcttactggagggataaacgttacaggtgaatcatttgtgtatgctccgggttatgaccctaataataagaataaatcatattttaaattccttacccgtggaataaattcaactccggctatcgtttggactggctgggattttacatggtttgcgatcggtcgctggaaataatttaaaaacaaatatcatgaagtattggaaacaaggattttatgacgaaccggtagacggttcagtagaaataacggatgaatattatcaagagttattagcaggacaatcggccgggctactcatagctgaaagccaaaagggatatccgatcttagttgtgcacgaagctactatcgaagaaaccagagcgcaaaaactaaatgaattgcgactttatgatttatccgaaacagtaaatcaattcagtattaatgacgtattcggttggttaaacaaaagtacccgtgtggggcttatgaactcaatcaatattgagaaagaagtcggacgatctgaaacaagtatctggattggtgatataaagtttatcttatcaatcgaaagagctattgacatgttacaacagttagaattgtatacccttgcgtgttatgacacgacacaaaggcatacgaaggctattagtcaattagagacaaaagaagaaattgaagcatacaacttcaaaactggttatcccagaaagctcaacttttccggataccctatcgtataatcgtagttttcaatttcctcaattgtctgcaatgatctgactgctgcgatgtgagattgtgtcacattgtagcagttgagtgcatacagttctacggcattcaacattgctaaagcgttaggtatagggataacatacttcactgcatcataccacagggttgtatgcgttttccctacatttttctcaatcgaaattgagttaaataatccaacacgtgtggatttgtctaaccatacactttccccttcaattttaaaagaattgacatcggtcgatttgtcaaacatctgtatttcagatattttcattttttgcacttcttcaatgtcgtactcatattctaccaatattgggtagccattcttgctttcaactataatcaacccagctgattgccctgctaatagttgattgtaatactcatccataatttctaccgaaccgtctaccggttcatcataaaatccttgtttccaatacttcataatttataatttttaaagtttccaacggcctattgcaaaccaagtaaactgccaacctgtccaagctatttctcctccgcttgctatataccttgtacctacttgaaatgaagaaattgttttagtatatattgttggagcatacactataatctctgttgtattagctgatactcccgttagttgtacgatataatttgtgtcatagaaacttgtaggtagatataatgaggagaatcctacagctccagcatttactccccattgcatcaatagcccatttgaatattttacatatccattttgcgcttttttattccatagattttgtgattctaattgtatagcattagtcccgagagaacttaggtgaattaaactacattttgagtgatttcttttaaatatttttcattttgatttatttcgtgacaatgccgttgatgttgtgtgttatatattattttggcaatgattcgtctatcatttccttacttttatgcctattattcaacacatttctatttgacgtttatattttaggatataattctaaaggtgatatgattttatataatggtgataaggaaataaaaatcgaagtaaaggatgaaagctactcttatgaagctatcatgggagaagatacactcactttgtatttttctcatccgggatacttggaaataccggttggctcttggtgtgacttctacggaaagcgttattctttgaagaaggatagcaatttcaagaaaaacggtgaacgtaacttcgaatatacattgattctggaaactgggaaggctgatacgatgttgtggaaagtacgccataccgttgacagaagtattaagttctcatatacagctaaggcacacgaacatctacgtctacttgttgagaacctgaaccgtcggagtaccgggtggaaagtcggtgattgtatcgagggaacggagaaagtaatcaactacaatcacacctatatacttgacgctctcaatcaacttgcagaactatatgaaacagaatggcagatcactgaagaaactgtgaatggaaagcaaattaagactatccatctgcgtaaagttgagtataacaaggagaaccctttgaaactgtcgtatggtaaaggccacggcttcaaggtcggtgttggtaggacttctggggatataccacccgaaataattttggtagaaactacagatcgcaatattgattattctacatacggatctaaatacctgttacttccaaagaataagactcttgtttacgaagggagaacgtataagacagatgcggatggaacttgtgtcatgcgtgctgataaagaacttacaacagcaaaggaagatagtctggactgtacagctatttatccttcccgtgttggtactgttagttctgttattgaagtgaacaaggagaataacttctttgactttgtagataaagacattcctgaagagttgaatttcgaagattgtctcatagcaggagaaacaatgacggttattttccagactggtatgcttacaggcaaggagttcgaagtaaagtatatccatgaagcgaaagacaagaaagaggcacgtcgatttgaaattgttccgcaggaaattgatggtattactatgccggagccggaagtctggcgaccgaaggttggtgatacatacgcagtgttcggaatgcaattgccgaaggcttatatctgtaacgatagcacacaaacgggtgcgagctgggaagctttcaaggaagctgctaaatacctctatgaacatgaagataaagcattcatatttaccggaacattggacggcatctgggcgaaaaaacgctggttacagataggtggaaagatcgtgctgggtggatatgtgaacttctccgatacacagtttcatccggaaggttctcttattcgcatgatcggaatcaaacgttttgtgaataatccgtattctcccgaaattgaactttctaacgaaccggtaggcacatctgtttcaagtgatctgaataagattgagacaaacgaggtgacggttattgagaagcataaagatgcacttcaatttactaagagacggttccgggacgcaaaggaaacgatgtcgatgctggaagatgcattgttgaatttctctggatctgtcaatccgataactgtttcaaccatgcaactgcttgtaggtgatgaaagtttgcagttccggtttgtgaactcaaaaacaaatccggcacaagtatctcataatattacttataatgccagcacaagaatactgaatgctccggcaggaatcatccagcatttgacactcggtattagtactctttcttcttctcacaaggcagatgaatataaatactgggatttggttgaatacaattctccggcactcactgatcttgaaaagaaatattatctatatgctgtatgcagcaaagagaatcaaactggtacgtttcttctaagcgaaacggctattaagatggagggcatagcaggatattatcacttcctagtcggtgtcctcaacagcgagtatgaaggtgatcgcagttttgttgagctgtacggatttacggagattctgccgggacggataactactgaacagataatttccccggatggggagacgtatttcaatttggcaaaaggggaaataggcggaaatattcaaattaaaaccggatcgtctggattggaaaatctgtctgaatgggaagcagctcacaaagaaattgaagatgctggtaaagcagcagaacaggccaataatgcagtagaagggcttcatggttatgtagatggagtatttgccgatggtattattacagaagccgaagcaaaagctattgaaaagtatatcaatacgattaataatgctaaagctacggttgaagccacttataacaagctatacacgaatgtttatttatccggttccgccaaaacgggtttattgaatgcgaaagttacccttatggggtgtatttcagacctgataaatgcaattaatacagctattgacgatggactcacaacaccagaagagaagcaaaacgttgatgcacatttcgcctatttcaatagtgcctatgctgatttcaacacagccgtagaatctgcaaatagagctattcaggataagctaaaggagttctcggataccgctatgaaagaagcattgcaagccttacaagacgcagaagatgccggcaaagcagcggaacaggcaaacagcgcagttagtggtttgcacgactatgtggacggagcatttgctgacggcattatcacggaagcagaggctttagccattgagaagtatctaaatacagtcaaaaatacaagggcagccgtcgaagctacctataacaaactgtacgcaaattcatacctggaaggtgaagcgaaaacaggtttgctgaataccaaaatatccctatttggtgctattgacaatcttattgctgcaattaatgtagctatcaatgacgggcagacaaccgttgaggagaagaggaatgtagatgataagtttgccctgtttaattctgccttagctagtttcaatacagcggttgaagttgcgaataaagctattcaggataaattgaaagactattcagatcagtgcttcgctgaattgaaagtactcaatactcaaatctccgcacaggtgacgcgggtcgatagcttaacgcagaggatagatactgccggatggattaccacggccgatggaaataaaatttatgcttctaaagagctagaaagtggcaatacgcttatatcttatatcaaccaggcagcaggtgaaacgactattcactcttcaaagattaacctagaaggtgctgttacaatcaccgcattgcatagtgacctgcagggagtgattaactccaagatcgacagagacggattaggtcagttggcatttgaagatgcggttgaatatgcgaagttaggcactaccattgtggtaggcggttacctaaatactgacctgataaaggttaggcatattgaagctgtttccggttttattggaggatttacaattgaaggtggtcgtcttgtatggacacgttctgattatttcggagggacatcaagaagtttaaagcttggttcaggaactgcaaaggaaggcgttgttaatgtgacttttaatgctgcaactgatggtaaatttggagtttgtgcagtaggagcaacagctggaggaagtgcggccatctatggttcttctaaatcaaatcctacatatccgaacaattacatttatgcaggtttctttgatggtaatgtgaatgtattgggtgatgtttctgcgaatggattttaccctcgtgatgggaatggaaatactatggacgtagtatcagatatatgggtatatggtttaaaagacagcaatacttttggatatagagcacatatcgtgaaggggattattgtagaattaaaaaatacataaagttgcaatgaaagtaaatttaaacagaaacttgcttgactttagaggtcgggagtttattgaattagtgaatgggaaagaaagtaagaaatctgtccgtgatttggttgcagaggcattatttgcagctggttctaatccacagaagaatatggaaacttccaagaagttacgagcatacaaaatgctacaacagattattagcaaccgtggagtacttaatattgagacagaagatgctgctcttttaaaagagatttgtggagaatatctcactgcaggtacatacggacaaatttatgatttaatagaaggaggaaacaaagaatgaacatcacagcaactaacagtaccgctacaactaaggttacggaagctatcagggttaaatacagaatgtcaacccgtggcaccgaggcagtcaaagatattactgccgaaatcattaaggatgaaacgactgtcggattcttcaatacatcgcgaaatggagtaaccggcttctcgctacatgaggatcatgggctaacctctggcgaagtgaaacaagtatttcagactgctattgatgattgtagcgagatattgaaatgaagtattaatattttagatatatgattatggattatttcaaaaacttacttattggattgattaccggtatagccgcttatctgaatcctatttctggggaaatcaaaagtcttattgctgtatttgccctcaatttcatttgtggactgctcaccgcactccttatcaatcatgaaagcttttcctttaaaaaggcatggagatgcatcgtagaagcgactattttctttgccttggttagctgcatctactttattggtgaacacaaaggaaatccggaaggtgcgctacaatgtgtttcatttattacgtatagcgttttttatttctatggggtgaacattctaaggaatatcaaagaaattctccctaactctagcaatggttacaaggtagtagctttcctgcattatgttctaagtgttgagtttataaaaaacataccgtatttaacgaactatctgcaaaaaggaggtgctaaatgattgaagtcatggagtttattttccaagacttttggcattggctaggaacagtgattatgatagctgtcatttgccatgtcaatttgattaaagttggtccattaactaagaaggaggaaaagaaatgaagactattgatgcaattatcatccattgctcggcaacacgtgccgggcaagatttacgcgcaaaagatattgatcggatgcaccgggcacggggattcaaccagatcggttataacttcgtcattgatcttgacggaatggttgaaaatggtcgcccgctatccatcgacggggcgcactgcaatacgaagggattctctgattcatcctacaataagcatagtgttggcatctgttatatcggtggcttagatgcagccggaaaacctgctgatacacggacgcccgctcaaaaagctagtttgcgtgaattggtcgcgaagctctgtaaggaatatcctataattgaagtgctcggacatcgtgatacttcgcccgatctggatggcagtggagaggtagagtctagggaatatatcaaggcatgcccctgtttcgatgtacggagtgaattttctaattttcttcgtaatacagtgatccgaccatgaaagcgctaatctatataaccatattcctgatgtcgggaatatggtttacttcctgcaaaacttctcgtaatatcgagacgcagaaacagattgactattcaggggatttcttgtatttgcgaaacttaattgaatcactacggctggatgtgaataagcaaacgaaaattactacagacaaactaagtgatctgaagattgaaaatacaactgtttatctttctcctcccgattcaacaggaaagcaatatccgattaaagaaagtactactactgcatccaagcaggatcaggaacgaacagaagttgatgaaacattatctattgccttgcaacagttctctaatagattggattcattgagttataaagtagatgctatgttgaatcagaaagaaacggttcttgaattgtcttggtgggatttgcataaggataaagtgtatataggtatcattatcttaatcggcattggctggcttatatataaaaagagaaggaagtagtaggtaaacattgtttccttgtatattgttataatataaatatattataaaacataccctcttattatggctagatcattttttttacatttctttgcaaaaataaaaataccgatgaaaaaggaaacaatgcaaattaagtttgaaggtcaagaacatcagattgattctaatacactgatcaacgcgcttattcattataatacaattattgcagaagctaataaggaacttggtggaggagcaagaagtgtatcagtcaaagttaatgcgatagagaagggatcttttgttattgatatagcattattggagaacgttatagcatccatcttttcttctggaagcgttggctatttatcggatttggtatctgttgctggaggtgttttctcggcatatagctattttaaaggtaagcctataaaaagtgaagaagagaaagatacagctaaattagaaatcaaaatagaggggaataataatacaattggagatacaataatcaatgtgtataatcaacctattgtaagagaggctatcagtaaatccattgaaacggcagatgaagatgctaatgtagaggggatgactatttctgtcgataagatgaaacctattcattttgaaagaaaagacttcaaagaacttatttattcggatttcgatacagaaaaggaaattccaaatgaggatgaagaagttgttgatgctatattggtaataactaaattgtctttcgaaaagggagctacatggcagtttctgtataatggatttaaaatatctataatagtaaaagatgatgccctcatgaagcatatagatagtggcgcaagattcgcaaaaggggactcaataaaggtaaaaatgaaaattataaaaaaatacaatcctgaatataaagcttatgaaaataagggatataaaatcttggaatttatagagcatataacagctcctgtacaaaatagattgttttgaacaaattattattgtaagtcgcttgtcgtcataatccattgccccgtctctctgattcgttttttattttaccctactcgcattgtatatttgaacttttcatatctttgcaaaaaaagatccataatgaaagtcaaacatgaatatgcaagaatgccggccaatgaggtttggaatgtagtagtagcttatattaataagaacaagcagtttttatcctctactggtattaaatataacgccaaggtcataattgattctatagaatacaaaggtggaagggaaggaagtgttagagccactgaaggagagactatcaataagaatcaatttatttccgcatttaggcaagtccgtgatatggaatgtatcaatacccaaaatgtcaaaccgtatattgacagaaagcaaactccatttattggcttactaaagtctactagaattattgagtaaaatagaattatggcacattttagaaatataaatgatgtaaggattctttccgatattaatctttatagtatgttagagaaaaaactggaatgggataaagcaggtgaaaaggcaaaaatgactgtaaatggttgttctatttttgtgtttgtttctattgaagataagttggaatcttatttgggatgtgatataactttcaatatttcaataagttatgaaaacatacagatagctacagaatttgcaaaacgaatacgaggtgttcatttatcgaagataagaaattatcaataatattgttcttagttgagcttttttgcgacatcgttgactgataaatgttgattaaaggatttttaatactaacctatgaaaaggttctgatactgcattatttactccaataggaatgagcctcgactaagtgtagtcggggctttttaattattatttgtcgtatataaaataatcatatatatttgtccaaataaaattgatatactatggaatacttagatgaatttaaggaatttgtaaattactgtaatcaaaatggtaaatatgttggttggggaaaccctaactctaaaatactaatagtgggtaaagagtctgcaatggaagaacctgatgagtcttataacagcaatgcatctatgtgggataatcatgttagtaatgatacaattatggagttatgtcataaagtagaacaagatgttaacgtagcaaaggggtggggtgtaaatacttggagcaagtatcagagattaaaagattatatctatggcagcgaagggtttcacaatcggtatgttgatttcccaactcaaatatttactaccgagataaatgatacccctagtctccgaactgctcaagccgataaaagtggaatttcctcacggaaagaattattccaggtatcctcctttattcaaaagttttcctgtgattatattagcatgttctaattatattcagaataatgacaatattcgcgagatagataagatttttggtgtcacttatgacggtgatgatgtcggtagatttttgtttaataaagggaattggttttatactcatcatgatgccagtggtagaaaacttgtaatccacactcgtcagctaagtgcggatgtaaaggatgatatgttaaaggagatggcaaaaataataaaaaaacatttggaaaggcatgtttgatttattaaatcgctataataaacagggatgtttaaaattcacaattgatgacaatttgaatagagaatgtgagaaggctcaaattcctgatgattgttgtggagtgtatattgtatatggctattttaaagggacgaaggttccagtttatatcggaagttcagggcatatagaaaatggaaagacagtgcatcgcaaaggaggactaaaaagacgaataattgggaagcagcaaaagactcctagatggaaactgtggcctgaaaaaatgcgtgcgctatctatcttcgaattggaaatatgttggtataatacagaaaatgacaatccgttactagtagaatactgtttaatattggagtctgttatacaaaataaaagattacctctttggaatagcgaattaaaattgagtagggaattgaaaggtgagtttgaagattttgtaaacaataataatattgaatgtttaaaaatataatatgggaaataaatgcgatcataacttcgttcttgaattatgatatttttgttattaacttaaataagtctccagtatgaatagaattataattattggtaacggttttgatttagctcacaatttaaagactggatataaagattttataaatgattattgggatactgttgaagaagggatttatgataaatactggcggttgttagaccaacaatatggagggggcaaacaccctcttaatgactatgaagatcagtttataaaaattggaaaagaatatgataaaaccggagttaataaagtttgttcttcttataaagaagatagtcctttatggaaattgcatacactaattgatgagcataataatgatcctagttcaaatgtgacagttactttaacgttcacaaatcatttttttgagcgtatatctcatcaatgttctcttgtgaattgggtagatatagaaaatgaatattataaggcattgaaagagctacttcaagaagaaaattaccaaaagcaaaacgaaagtatccatacgcttaataaagagtttgatagtgtaaaaagattgctagaaaaatatttaactaggattactgaaaacacagaactgaaaaaacatcaatctatacaagatgctttttcaagttatgtagaatttgaagaagttgccacttgtaagcaaactgcatttattaactcttttttttctaatatggatatacgttttgattttgacattgaccggcatggagatctttcatataatgaatgcttgacaaaggatgaagaactgaggtactatattgataagaaacttaataatgacaattttaaaaaagagaatcttataccaaacaccttgattctaaattttaattatacaaaaacggcagaaaaattatatattaaaaatggaaatgacaagattattaatattcatggagagcttaacaatgaaaataatcccattatattcggatatggtgatgagctagatgatgattatgaaagaatagagagattacagaataatgattttctagagaatattaaatctatacgataccataaaacaagaaattatagaaagcttttggagtttgttgcattaggtccatatcaggtctttataatggggcattcttgtggaaactctgatcggacattattaaatactttatttgagcatgataactgcctatctattaaagtcttttatcgacagtacgaagatgggacagataattatattgatatgataaaaaatatatctcgtaattttaataataagcctaatatgcgtgatatagttgttaatcgagaaagttgttctcctttggtgcctgtaaaaaaagaggtagccgaataagctacctctttcaattataaatagttttttcccagtcatccaacactgttacatcccaccgaggaagatccggattaatataggttacagacctaccatacacagagaaactttttccaataaactcgtcgatagcttcatcttcccctttttgaagacagatattcataaaaacatgcatttcattccagtttgtaggcccaatgaacaaagattcaatgagcctacctttaactggagcaccgataacctggtcttttatccgctcaatgagagcaattgcttcttcaaatgtcatacttgtaattttagagcaaagatataaaaaacagatgccctctcccctatcatataaaagctatttcaatctgtggaatttcagtattacatatttcaattctattaagaaagatatttttgtaattcttcgattgcctgtgatgcacttcggactaccacatacttattacgacatgattccgcttgtttttgaaactccttctgttcttctgactgtttccctaccctcgttttaaactctatgcagagagaagcaaaacccttttggggaattagtacgatcacatcagaaacacctggctttactccttgacgtttcaggttagcagcttcccgtacatgacgacttccaccattcggaacggcaaatataagtttgtcaggtatattaggaaaatatagaggaataagtttaaagaactctgtttgtatgcgagcttcctcgttattatgtacttcttttgaacgtggaggattacgctgatctgcataacaattataacacataaagccggtatcggttttaataaccgacaccgtttcctttccacataaaatacacttttctttattcatttttaatattattttctaaaaaacatatctcccgaaatagatcgggctgtatcatcaccagttagccgtatgtatcggaaaaaattctgttcggtccgatgcccggtgagtttcattatctccagtgtcttcatccggccggtgagatacatattcgttgccgcacttcttctcgctgtatgactacttatcaactcccatttttcacgagtaacagtaaacagctttccacctttggtataagaaaaagtaattagatcgttaagcccgatttctttcattatcactttcaaatacttgttgaagtactggatgcacaaaccagaaggaacctgaccaccatactttgcgaatatctcttttatataatcatgtgccgggaccttgacatccacattggttttctttgttcggatcataatatagttatttataaagttttgacttgtcaaccttgaatagtcggaataacgcaaagcagtaaggcatcccaatacaaacatgtctctaattctctcctttgctttccgcttatcctgccctacaaacttgtagtagtagatacgggtaatctcattcattgaaagaaatactgcattcgtaggctcacatttcaaatcaatttcatcataagtaacatctactgcataattgtattgcgaagctctacgaataagagtctgtatttttagaatatatcctacaatggtattatgtcgtaacccgcaatcttcaagatagactatgaaatcatcaagaaattcagccgttaccgagttggtgaatatgtcacaatcaaactccaatgaaaagttttcaatgtgctttattatcgcatcataaacggctgcatagtgttcagacttgcgcctgctgcgcttttctaacacatcccggatgaagtcggtgaagaatactccttctaatggcttctcctgacggaagtgattaatgtagtcctttctcgctgtgcggggccggacaggttgtgataattgtaatgctttggtaatatcattttaaagggttaattactttttttcatatttatcaattcgggattatcatggatattaccaatcataatagtatcatccattcttgtaaggtcagattgcccgaaatagaataaatttcgaccattagaaagttgaaaacgacaattatcatataggataatagctgtatattcttctggttcaaaaccaaatgtaacagtgtgaagaatatccccttcatagatctccatccctttcttgtctaataacccggtgaattgtcctgttgtattcagaataacttcataccgaatcatgttccatacggcagctttgtccgggcatatatatgccttgccgtttagcagaagcaaactgccatacaaccattcatgaatcccaaatctagattttcctctaaatttaattgttctcattatattcttttttgattgttgttatacgtttatttttgcacgggaaacactccccaattttccgccttcttccatccatgttttatagcatttatcacaaagagagttgccatatcctgaaacatagcgttcgctccctttgggtattgattcagcgcatataaaacattttgtatcttttcgggctactttctttgagaaagcatcttcgccttgtctttttgcatgataagccatatttattcctttcttatttgttattagtcaattggtaatttcataaaacacatccagattgttttgctctgtcttcctgttgtatgtccgaaaagaggtttaaatgggataacagacaaaacttccacagcttttatttcgctttcgttccacttgaatatcaatgtaccatttggttttaagacacgcatacattcatcgaagcccgcctttatcacttcctgccaatttgtagggagtttaccatacttctttgccatccatgaagtttctccaagagtttttaaatgtggcgggtcaaatacaaccatgtagaaagaatcgtcctcaaacggaaggttggtaaaatcagctattacatccggctttacctctatggttctgattttatctctatccttggccgtgacggtttcactacgcttgtcaataaataaagtgttcggattatgcttatcaaaccaaaacatccggctaccacaacaggcgtctaatatgattttcgtttcactcatttctattcttgttttgagctatgcggtaaacgaagaatctaccgcatagctgatttatcatttatttcttgccgcttctaaaactggaagatttgtctccgttggtatgtatatcacagttttatcattcagattgctttgttgacgtacccacaaatattggatatatgcgggggtaatacttccattttcaattttaatcgcttcggcagcatctttagcacgttcgatttcagcttgggcgttcagcttttcagcttccagatttgctttagcttcttcaatccttattttacggttttgttctgctttagcaaattcagcctttccagacatttcttgctgccaaacgttataataagggatggtaacaaaacatcctacaacaattgcgacaaatacgatagccgccaaaattccaagtttattcataatctaatattgggttttataaagccgcccaaggcttattagtttattattattatatttgcaaaaaaacaaatatatgtcaacaatatatcgtaatagaacaatccgcccttcaagtagacttgaaacatctgtatcttataaaatcaatacagagaaagtcacgacaaatgatacattggttattaccattaaccatgaaagtgagaattttagtaaagaatttactttttcaggagagaaggttgcaaaccgttcctcaatacacttcagatatattaatggagaaattatttggtcaccagttcagcctgattagattcatatctttgcagacttaaattattcatcatcataatcagtatcaaagatacgtgcaaccatatcgacgatattttcttcaatatcctcggtagaaccagttacagcattagctatattctttttctcctggatgattcgataaaccttctcatctatcgtccgacggccaagaaaatagtaacaggttacagaatccttttgcccgatacggtgtgcccggtcctcacattgacagcagtctgcatacgtccagggaaactcaacaaaggctacattgcttgatgctgtaagggtaagacctacaccagcggcttttattgagcaaatgataatatctgctttcgggttgttctgaaaagcgtctacggctctttgcttctcgtcctgtgagtctcttccggtaacagatacggcagtgggaaagtaacgtttcagttgatctacaacttcatgaagcgaacaaaagagaattatcttctttccattctcccggaagtctttcacaaattcaatcacatcacgtactttgccgcgagcggagatctgccgtagaatattgatacgtaccatcacttcaccgcgcattgccttagctatcttatcgtcgtcagcgtccttgtatttctgtagatacataataaggtcgcgttctgcatccatatactcttttcgatttgtgatttcgcaagtattcacctgccgtattttatcgggaagatctgtgaggacaagtgacttttcacgacgaaacatacagtacttccataggttaaaattcaattctctcaaatttgatgcttctctctgtccggaacagtatctatcaacaaatggtttatatccaccgaaatcgttcattcgatctaaaatagccaactgcggaatcaaatctttaggccgatttaccaccggtgttcccgtcaattcaataacccattctttgccggtacaaatacctttgcaaaacttagcctgctgggttgatgcagatttgcaacgatggctttcatcaatgataacagacttgaataaattgattgagtttctaaattccacatctcgcagcgtccagccttcagctttctttatacgttgtacaaagtacttctttaatgattcatagttaacaataaatacctggtgcattcctgtctgaaagaaaaaagtccatgtatcacgtaccttgtcggttaggatcatcgcctttttatccgtaaacttctcccattcacgtagccagttgatttttaatgatgaagggcatacaacaagacaaggaaaagcgtctgcgaggttaattgttgctatactctgtaatgtcttccccaagcctggttcatcgcaattcataaatcgtttaagttgcaaaccacgtgcaatacctttaagttgataaggataaggctgaattttcaaattgtgcggaacggttaaatcaggtaattccggaatatcataagcgatatcctcctcctttttttctgtaccatttacccaattgatattctcaaattgccgtatttgataaatcattctttcaaggtcaactctactccgagctggaattatccaaactttttttgcaccgtcaaaacgtcttccgggaatttgtcggactcgatctacaatagaaggtttatacttgaatgataattcaaagttatctccttttaattcaatattcatgatttagagtattttatagggggataatttccccctatggtgattgtaagttatgcggttgcgtcaagaggtgcaggagcatctatctgtttttttcttccttttttcttcggcttttcttccactatgatagcttcttctggttcatcggtttcgaaatcaagacgttcttgtctaattccccatttttcttcaaataggtaactttctacttcagcatcacatgcagctgcatcaatgcttaattcttcgtagtagggatattgttcgtcaaggagaggaacgaagattttcaagtcaacgactttgccggactgaagaagtttggatcccatgatagttattccggaaaccccatcgacactgtcattcgcataacctgtaatgatataattttctagtgtctctgcatatcccggagaagaaaagctatccttgttgatattagaagcctctggctgttcacacaatacgacgagatgcaatctaagtcgaataaacgcctcccttaaatcacagtgaatgatctgatcacagctcttgtttattacatttgtgtagtttgattcagaaaaacgctcattgtacactacattcagccgatctttcttaacgactgcctttttgatctcattttttacttgttccataatcttctttagttgataaagtgataatactaaacgttgatacaactcccatgacggcagccgtagttatttctcttgatgttgcatcttctctttgagagaaagataatgctgtaaacaggccgataacggccagtccgattgtgatttttttcagggttctcataatgattactttttattgttatacatactggccattttcatttcctcttttgctttacttatcacagttacgcaccatgataattgatgtgttgccgtccggttacaacgttcgcaccaatcgacgaggtatcgttcctcccgacataaagaactgattagggcatttatcgctgttgctgtcgctttcgcatttttagctgtatcaacgagcgtttgcataacctcggacttcattgtctcattaagccagtatttcgagtctgcaagcagtttaccggaacgggcaacatatacagctaaatcattgccacgttgtacagcttctgccgcatcttcattcatagtaatattgagaaatgaatctatattgcttaattcagccaatatctgttcttttgatgtaataagtaaattcatattatttttatgataaaatataatcagaccatcaattgccaccatttgaaagcaaggtcctcgtatttctctttccctctgatatatgaaggatggctacgatcggtgacaaaatgcttgaatattttgcaattcttttttgagattgcataaatgaaatcctgttcacttcctgcaatatccatataccaggcacgggaacgatcccaatcgaaaaaatcaatagcttcatcgaactgcgcttgggattccgcaaaagtcgtttttaaatcacctccaaagttgaaagcagatagccaccagtcccacttacaccgcgtatcaaggtgataagcaaagttcccgtaatagaactcctgctgcctattaaccataaacctttgtgtgtcagactgtgtcaatacaacagctaagaactggtctttctccgcttcctttcggagagctctacgcatctcaaggcctaattcaaactcttcttgtgtatatacataatcatctaccatcagcttgtcataccgaacacggtcattctctgtgataagagcatctacaagcgtaccaaatttgaaagctttctctttatccccgtattgaacacggggataaagatagtttttgagctctgtcagatctgaattgctgacttctgtacgtgagtaatatgaatcaggatttgacataattatttagcttttacatccgcttcgtaacggatgaattgtgattcgatatgcttttgatctttgctatttgcctgtttctcgcaataggtaatcatctttttaaagattttctccaattcctcaactggtagagccttaccttcgtttagccaccacatctgaaatacttccaaatatccttgtaggttaactatgacaatcttttctttcaccttggcgtttgtcggtggaggtgcaacagatgcagcagcaccagcaaaaagactaccgatggtactttgttgagcctttagtgcagcctcttgttttgctgcttcttcctctctctttatctcttccattcttttagaagttgcttcaatttcacgctgcttgcgtaattcttccgcttttgctgctgcttccgcatttgccaaacgaagctgttccagttctgccaactcattacgtttagaaggaatacggtcaataaggtcttgctttacatttaagattttagccttatattgctgggccaattgctcatatctaccctgtagaatatttcgacgaatttccttttttgtttcttgactgatatagtaagtcgctgaatccgcactaaatttatcaaaatgagatttaggataatcggtctgaaaaactgtaattcctataacttcgcgatcgaagttctcatgtgtcaaattagagaagatagcctgtaattcagagactttacttgaaagatactggttgaaataagaaagaaggctattctctattgtctgttgatagtttgctttctctgtctcaattctagctctctgctctgcttctttctttctcctctgctcttcttcatacttatacttagcatactcattgcgttttactacaagcttgccggggattgtagtagaatccttaggatcaatctctttttcttgtgaagtaaagaaagaacgcactttatcgaatatctgcgtaataggtttacgccgttcatccatattctttagagtgacatttacttttttcagatagtcagctgctgcctggtctattgtttcattcatgccttctccttcgattgtatcaagaagagcctgccctgcttcattgcatttcttgactgaactggaattcttaccaatggtatcaggaaaagatgaaagaatgctctttacttcgtctattttgattaattctgttgccataatcgttttcttaaattggttagtaatagctagaagcctccgtctgcatcatcgtcagatacttccacttgaacgggttccggagcgtctaattgtttttcttccccaaaaggtattttggtatcatctgcagaggctacagattgaacaggctcattaaccttttcttcatcaacaatgccataatcgataacttcttcatcttcctgttctgtcgccatcatagtatactttccggtacgcaccttggggtaagcatcaaaagcgtgcttaatcatcttattttctaaaaagccaggatcaatgccgccaccattcgaatagtacagatcattagctttgccctctactcgttgtccatctttgtagtatgagttgtttttttgggaaaaatcggcataaggcgcaaagaaaagcaaagttctacataaataaatgcaggtcagcatcttgtatgcagggcgggttgaagcaggcttcggcataaaaagcctgaaaacacccctttcggacaaagttcggctactaaacagctaccggttccgaaacggggtatatacggcataacaagttctgtttcatcgctttgccttgttttgcatagctcttggtaagaaataagtaactacctttagaaacgaaaattttagagttatggaaacaaagagaagtacgtttgcgacctcgttctacatcaagagatccgcagtgagaaaccgggacgggaaagcccccatcatggtgaaaatctccgttgacggcgatgacaaggcagtgggaaccaagctgttcgtcactcccgacctctgggagaacggcaaggcgaaaggcaagtccgccgaggcaaacgagataaacgggcaactgaaggaggtctccgcccggctcaccaaccactaccaccgcatcctccgggaagaggatttcgtcacagccgagaagctgcgcaacgccttcctcggtgtcggcgtgatggagaactgcatactgaaggacttcgggaacatgaaccgggagtttgaggcgatggtggagaaagggcagcgagccaagtccacctacaacaagtatctggctgtttacaaccatttcaagaccttcctttgggagaagaagaagcgcaccgacatggcttacaaggagctgaccaaggagatcatcgccgacttcgacaagtacctgcgggtggagaagggattgagcgccaacaccctctggatatacaccatgcccctgctcagcctgaccgacaaggcgtggcgtcggggcatcgtccgcaccgaccccttcggcgagtacagccttgagatgcaggagaccgaccggggctatctcacggaggaggagctgcgcaccttggctaacgccgtgttcgtcaagaaacagaccaacctcgtgcgggacatgttcctcttcgggtgttttaccgggcttagctacattgacataaagacgctcacccatgacaagatacagcgcatggacttcgacggcgaggaatggatcatcacccggcgcaccaagacccgtgtgtcgagcaacgtccccctcatggagattgccaaggagctgatagaacgttacaaagggcttgccggaggcgacctcgtgtttcccatgcccagcaacagcgtgtgcaacaggcacctcaaacagatagccaaagcctgcggcatccacaaggagatcggcttccacctaagccgccacaccttcgccacgaccgtctatctctgcaacggcggcaccatcgaggcgctctccaagatactcgggcacaagcacatttccacgacccagatctacgccgaggtgaccaacaggatggtaagctccgatttccgggcgatctccggcaacctcgccgccatgcagcggagcgtgctggagaagaaggacaggaaacaggacgggaagcgggtgcgccgctccctccgggaaacggcttgacgccttccccggcgcagaatgcggcaaaggcaggaacttccgatgcggtgtccctgcctttgctgcatttcccgatgcacccccccgtgcgtttatgttggacttttcccccgtttgcgctttgggcgcatgtccacgtagttctcctccagcatacgcagcagatccgactggcggtagagcgtcttgcccggcagcgatatgtacgggatcagccgttgcgtgcggtagtcctgcaacgttctcggcgtgatgtgcagcagcctgcacacgtcctcgcccgtgagatagacctcgccgttcatcgctgggcggaagtgcgccgtcaccgtgtcgaggtacctcatgccctcttccaacgcctcgaagtacgcccgtacctcctccgtgtcccttgtgatcacttccatctcactcgtcctccgtcatttcccggctcatggcttccacgaacgcctccacgtcctccgtccggtagtaaatcttgtggttgatctggctgtacggcagcagcccccggtcacggtaggtctgcaatgtccgcttgctgatgcccagtttctcgcacacgtccgccccgtccatccagttcatcttttcgggcgggcggtagcgggcgcaaagctccctcacgtgctgcgagaagctgccgaaccgttccttcatctcctcgaaggtctttctctcgatgcttactatttccattgtcccgatacgtttttattgttatacttccctgcaaatataccggtctgtacatgtccgtgtatcaaaaccgtaccgcttgtcctcgttttgcttcacgcttgtagccttgtcacgctccgggcggtgaaaagcagggagaagctctacatatccgcacgcccttccgcatattttccgccccttccgcttgccgtgtgccggacatttcgcatatttgtaaccgaccaaacatcatcactatggacgaggctgtctttatcgctcaatacaccttccttgccactcctgcggtcatcgaggaggagagccgaatcttgggcaagatcgcacgccgcctgcgttgcgagtacgtcatccgtttcgaggacgacggcaagttctatttcctgctggaaacccgttccggctacgaggagcatttcgcccggtgcggctggtacgtcgtcagccagaccgacttcaacagccgcctgaccatcggcatgggcttgtacgagagcgggaacttggcgggcttcatgtacaggctcgattccggcagcgaggacgaggcacgtttctggaacaacatccttgtcttcaccttcttcaacggtttccgcaaggcgttctttccgctcgacaaccgctttcagggtttcttccgcttggacggcagcttgtgtttatacctttatgactattgccccatccggcggaacgacaagatcaccttcgaggggaagaaggtgtcgaacgccgtctggcgtttcaagagcggcgagcagaccgaccttttcgtcaagctcttctccatcgccgccagccgcattcgggcgattcaggagaacaggcaccgtgccgtgctggttcccgtcccggcatccacacgggagaagcaccgcacccggtacgaggcgttctgccgcaagctctcggcggacatgggagttgccgacgggtacggggcgataaccgtcgcttatgaccgggcgcaatacaagggcacgcacgggaacggagaccgcaccgccaatctggagttccaccccgaacggttcagggggaagtgcgtcttgcttgtggacgacgtgcttactaccggggctactttcatagcgctgcggcgcaagctgatagcgcatggggcaaagttcgtgataggtatgttccttgccaagacaatcgctttcgaggacgagcggaaggcagaggaaggaggatagaaacggatgcggataatccggagaagcggcgtacatgttggtatatccacatgcgtccctctttgcaggttatcgtgaatggtctaactcgatgtaccagccttccttgacgggcttgtatagcgtggtgtcgttgtatgtccttcggtagatctcgttcagatcgccgtgttcggtgatgcggatgttccggcggcttctcaatccgggatcgtaaacgaaactcttggatgttccggcatccacgatgccgtgggaatagtacggcataacgaggctcacatataccgaatccgccgtttcccattccctacggtcaacaaggacaagaccgcatccaatctctgacaacagggagtcgagcagaagtcggtccggcttcagcagcccatataccgggaggtcttcttcgtcattcgtttcatgggatgtatcgctttgctctgttgaatcaagtataatgacctcttccggagaaagcgacggatagtggaaactaccttctgaactctctgccatgatttcgtacaccttgcggaacgccgcctcgtgcgtggtaaagtggcgtatcatttcctcgtcgctcggcggcatgggcggctctccgcagcttgcggcaaacaggcttgctaaaagcaggattatggcgggtgttctcatattcttatgtagatgatgtttgacagcgtttcgctttaagcggcagtgctgtttgttatctaaatcttaatgtctttattggcaaaatcaaggcactatttcgtaaacggttcgctcattgttcctgaaaatggtctgctcaatctggcttccaacctttacgatactgtctatgtccgcattgactttcaggctaaggacgggagcgtatttcagatgctcgtaatcgaccggagtattgttataggttgtttcgacaataggataattatgttcctttgcgaactgtttcaaggtatctatgtagggaagctgctctttatccatagcttcaaaatctatgtaaaactttccgttctccagcacaaagtagatgcagtccacaccattggaacaaatacctataaaatcataatcagtatttcctgcctgcacgtttctcaatacatccggcagtttgtctatcgtaatccgggcagcaaccgggatattggagtttataccgtcgttttgcgtcactcgtttattcccatgcccgcaactcaataaacttaagatagaagtaaatattcccataatttttaagaatctcatagttttatgcttattattaagtagataatgcccgatggataatcgaccattaaggaagattgatccacttgttagctgcacttattccaatttataaataagcccttttattgtacttgcaatcaatatttctttatcatcaggagagaatgaaatattaccatagccgatatttgataattcagccaatatttccatattagggaacgtacaaagttttagattatcttcttgatataaggcaatcatcttgttgttatgcgaaagttgtatatccaaacagccttgttggtgtttaattggcagttctatatttaagggcaaaatgcgaaaagcaagattgccttctttcgcaaagtataacacttgctttaaatattcactatacagaaaatttgcatcgtccaaatcgcagaatgtttgttcaaatgttctgttgttcatatcaaaccaaagatagaagtaccgattcttttcacttgtcccttcttccggtctgcgaaacccgtcaatgaagtataattggcgcgaagggatataacatatatgttcatacacttctctcatatcttcacggaatcttgtttcctttccgttttcaatatcataaactgatatatagccgtatggaaaatcataccccaaattaatgacatacttgttatcatgtgaaatacaagcgtcaccatcaccatttgaactacctattttcggtttaagtttgcaacggattgacatggttgctaaatcatacacaacaagtttgcggtcattatttttagccaagagcaagttgctgtcgtctgaaaagaaaacagatgcattgactacttctttgaactgtgctaaatgccgatatgtttcattttcaaagatgtttatctgactactattaacttgtgcaatcaaatgtttgtcgtctgacatctttagaaaatatgacttcttaaaagtttgtatcagttccatgctcattatttttttatttgcagctaatggctaagcggggaacaccgttaggtgttatcacgctttgttagctacctcttttgtattttccaattcttcaatagttctcaaacacattcctttaatgcttttgtttgaggatttctgatagactaaacgcaaactgtttagaatatccattcgttgattgtctgtcatagtaccaccaaagaaatgattgttgccgttagcaactccggtgcaatgccttcttatccccattgtaatgtgacttatagtaagcagatctcttttctttaacattacattacagaatatgtcccatacatcattatcccccatatatcccattatagaacctgacatttgacggactatcgtacttgaatgatgtgcatattgttttgcaatctcataagctcgttgcttaaattccacacaagaggattcttttgcaaaatctttagcataacagccgtgatctatatatctttcacacaccataagcaatattaataaatactcccaaagtaacttttcttctgtttcttgatgtaaaacccgaattaacttttctcgattctccgaagataaaaaccaagtttgtacacttaacgtatcacacgtttttccgaacagctcactacgagatgccatagatataaagtttatacatttttttcgttgtactacattttcagattgtagctcttccagtgcgacatccaatgtttctttggtgtacttatactttctcattttaattcaattttacatggtagctaatgggatgtagatagcaacctgttcgggttgcttatctacttgttggcaatatttttattctaatttaaaataccattccaaaaaagaattaaagtctttccattgtggtaataactttccattctggaaattgattagtttttcgcctaattcaatttcaataacttcctctgttttacgattataaaagaaaccaccttctgcttcaaaactatctaatgggaggtactcatctggtaactttaggatattccgagcagattcgatagcataactcaaatcgtccgaataaatactgaaccaacatacattatacatttcactatgccgcccaagaaatgtcatttcagtagtatgtaaattgaaaaatgcaaaatcgctattcaaatcaatacctaaattgattaaagcagttttgtatttttcatcttccttttctgaataaatgccttgttgtttcagatgttctattattttattgctcagcataattgaatggtactttattcattttacattttattgctaatattcggtggataatcgactctattaagagaaatttatccgcttattatcaacgagttattaatagtatttttctatttccaccatttcatttccattatcatcccaaaataatgttccgcaatcactacaactttttcctgccagatttttttcgtctatgtctgtgtctaacccgaaaaattgtatattgccacatttcggacaatttgcgacataaagcggagttttattttggaaagaaactaatttgaacttccagaaagtcgattttattttcgttaatctatcagcatccgttttaggtgcgacaaatatataatatgtatcattacccatatccaacaaaacaactctcaaaccatttgatttaagatgtttgtcaaagtattcaagtgcaaaaggcacgaaatcacctcttttaggtgtatctatatctttatcaaattgctgatatacttcattgcttgatatatctaactgcctacccaatagagaaacagttctttgattaaagaaattgaataaataattatttccttcttctccgctccaatccacaaccaaagcatattctttacgaattagctcttcgaggagagcatcatcctccttgattttctttatatccatatctgcaagttctttctctgaaagaaccttagcgagcattactttgtaattcatatagtcttttttccgttgataatatgtaattatatacgttttccgctgtatatcttcgctcaattacaaatatatatcataagggcgaaacttcggaatattcggtcttccttttttcaaggtatgcttaaaagcagttctgcgggtggttatttgggcgttccccttcgggtcgggcttttgtaggtcttaaaattccatattctcctttttataatttttatagcgaatgtttagaacacctttccattcttgacttggacaggcgtttattaactggatatatttgtcgccatcatcaatacgtatgacagattccaccagttttaataagtcccactgcaaatcataaaaagaactctcgggaaaaatttgtaccaatacttcagcttcatcaaatgatatggggagttgtattcgctctaataattcatcataagaacgtataacttcaacaatgttatctgggtcattgatgctttcattaggcatacgacctaaatctttcaattgtaaaatttcagttctcatattattgtttttttagagttcatgatgtctggcagctaatcgacctttatgggcgattgaggtgcgtgttagtatttatttttcattttgacctaagaaatcaaagatattgtttgattctttttccatttccaaagaacccaaagcgcctaaatcatttgaatatatagaattatcagtgtggttaccgacatttataaagtaccctaaatccccatcttgtcctatcataaaataatttggctcaaagtcttttatttgatatgtttgatttctttcctctaaatcagagtatgaatacagacatatacccgaatcatccacttcatacacatcaccatcattgattttagccagaaaatcaatgtaaagttgcggaaaaataatgttgagctttgcttgaagctctataatcctcttttctatttctttattgtcggcaatcataacttcatattatttattccttgtaattttaagaacctattcagtagtaatattaagatcttgtttatttctccatgctatcctaagataatcacctcttattaaacctttatcacggtaatgtctaactattttagagggcgaccaatccttgccatcggaaaataatgttccgatttctattaacttttgaaaaagaactgcacgcttttctacatcgccagtaggcattgaaatagaatagtatgattctactttttcaaatccaatactgataagttcattcttaaaattgtcattatcattggctataaatatattatttccagccaattcaatagcaacgactttatcttgtaatttttcattcatcatgttaaacactaatgtttggtggctaactaacctttataggaatgttcagccgcttgttataataagtttccaatatcaaagcctaattcttttaatacatttgtttgttctttttggtattctaaagttccactatggataaaatctttatttacaatatagctattggggaaatccttgtaatacctcattagaaagtctggtataatttcataagtattaaaacaaaataaaatcttaccagattttactaatctaataaactcctctttactttcacattgataaaggttcccatcttcatgaaaaactctgcattgatcaagaaataatttcatgttgaaattagcaaaattagctaaatattgagggcgttgccaccgtgcaatatctgtactgtctggagatgatacgacttttccccatatacctcgttttataggaaaagagttacagctaaaatagagacgataatgggtttgagcaaatgtctcttcattcagttcgccttctaatgatgaaaaaacgccataacattcgtttgtcaaaagtcttacataatataattcaccatttcgaccattaattttataaattgcccccaactcatattttgccataatgctttgatttttatttattataatgttcggtgtctaacttattatttagatgttaagccatttgttatcaatcttctttctatgtaatttagttctatctatatctttatagaatagtatttcattttcattaatactatcaagatatactaaatcataaatgtcttttacccgtattaatcgcatggaattaagttctattacagatagcataaatcctgaaatacaaaatttacgaatatacattggaataaatactaaattttcgtgatacaataatggacctccaaagcgtttgtcacaaaagactttctgcccatttacgataagattgccaaccagaggaccaccttggcatatttcattcaaatttgtgtattgaatatgccagttatcttgttgtatatcttttgtaaatccccaaggagtatctaatttatttacaattccaatgctcataaatttctattgattgataatgtccggtggctaaccgaccattaagggaggtttagccgattgttatcgttctgttatcttgtttctattaattgccctatttctcctgtttttacattaattgaaaagcgaaaatcgcaatttgatatattgatgaaaaagtataaaattccattttcaactctcacatcaacgaaatgtagtgctctaccataatatagattctcgtaagtagcaataaacaaatcagacacattccaaattatttgatttgttgcgcttaaaacatatgctgaattgtattctccagtatatggattttcaacaacacctattacattatcatgttctaataaaatagcgcacaaaccacctttttcttgtttccgattatacacctttccattacattcccatgaaatctcaataggaagaatatctccaacagagtaacatgatgttgtacccggagaaattgggcgaatatatttaaatgactctattttattcattccatttattttttatgaacggtaatatgtaattatccacgttttccgctattatcttcgctcaattacaaatatatatcataagggcgaaacttcggaatattcggtcttccttttttcaaggtatgcttaaaagcagttttgcgggtggttgtttgggcgttcccctccgggtcgggctttccgttacaagtcctcgctatgctgtgggctttcccctgcaatccctaacgtgggtgaaagggctttcactgtcttgcgcttgcaccttggcgcacgggctgtcccgtcccggcgtctgtttccgaccattccggcaggctgcatggccgaagccggacatcgggacggaaggacaaacggaacacgtccgtccgtgccgtcacacggggcttcggctgttcgccgaaacttcccgtgccccgtcccgcccgaaagagttccccggcgtttgtccggcagccggaagctgaccgtcctcccatatacttctcccgcccgtatctccttgccttgggaaacgggcgttcccggctctccggaaggcttctttttcccgcacccggcaagtaacttaccattgactggaatgactgacagggcattttttccctaagctgattggaaaaacattgacgaaggtaggcggaggtgaaagcaaatccgcaaaaaatgccaaatctccaccctgcgggtagtatttaccattttttcagatggttgcaattcaccttttccgctatcaatgatggtcaatgttcttcccaatcagccaagggaaaaaaaatggttggggcgacaagcgatgaaaacagagtaataacgattaaaatttgtgagttatggcaacaacgaacagcaccatcgaaaagattgcaccgatgttcaccgatttgttaatcaagaaaatcgagtgcttgaaaacggattggcaaaaaccgtggatagcgagccttgaacaaggtttgccccgcaacatcagagggacgctctataacggcggaaatgtcttgatgttattgttctacaccgagttcatgaaattcactttgcccgtgttcctcacgttcaaccaagcgaaggaagaggatttaagtgtttgcaagggcgcacgctcgtttcccgtctattattggtttaagttcgtggtacacaaggaaacgaaaaagacaatcaagtacgaggaataccgcaagctgcccgcaaccgagcaggaaaattacaaggtcatcccgcagatgaagtattacaatgtcttcaacatcgaccagaccgattttgccgaaaagcagcccgaacgctacgagcgtatgaaaaagggagagcaacccgaagactattcggacgggatgatttacgaggcgttggacgagcttgtctatctgcaaaattggtattgccccatcaaggtgcagtattcggacagtgcctactattcgccctcttccgaccatatcatttgcccgcagcgtgagcagttcccgcagggagcggaatattacggcacgctcctgcacgagatggcgcacagcacgggaagcccccaacggctgaaccgcacgttcggcagcttcttcggggatgcgctctatgcccgtgaggaacttgtcgccgaacttaccgcagccctttgcggtgcgttcttcggttacgcagccgcaccgcaggagaacaacgccgcctatctgaaacactggctcaccaagctaaaggaagaacccgcctttttggtggagatattgggggacgtgaacaaggcggcgaagatgattgccgacaaggtaaccgaaccgataaacgaacccgcagcagcctaagcgggacaataaaggaacaagagtataaaccaacgggcggagcagtccgccccactaaagacataagacgatgaaaacattatcagaaaaggaatttaacgggttaaacataaaagctatgtttaccgagaaggtggaacaggcaaaaaaagaactgtctccactcatgcaggaggtaaggaagtacataccccaagcggaatacggctaccacgtggtaagcggtgaataccccgcattttacggcgtgcgcatagagttcacgtacaacggcatccgtttccatgtgtacaggataaacaaagagaacaaatacaggatagccaccgacatggagcattttgagtatgtcaaccgctacgacatcgaaagggcgggcagccaatacgaaaagccgtgcaatatcggcgtgttcaccgccaagaaaataaacgattggataaactactgcacgcagatatacaggcaggtggagcaggcaaatgcggagaacgcccgaaaggtagccgacttcttgaaaagtatcgagaacgaacccgtaagctgggaacgtagaaactatgcgaaagggacgataacccgcaacggcttgcgcttcactttctacatagagaaaggacacctctcctttgaactgtccctaagttatcggggaacggctgattacgacactttccggctgttggctgataaccgctatatcccgaaaggaaactattaaacaaccacgggcggagcaatccgcccgacaatacccaagaacatgaaaacggcatttgtttacaaacggatataccgcctaatcctttgggcttcggtggtttatttcctcaccaccaccgcaggacggtttttcgccttgtcgcttgtcgtggctctgttttacttcgtggcacggcttgttctcgcccttgcgtggcgtctgtttgtcggcttcgtgttcgtactgataatcattcttttaatactctaaaatttaccgatatggaaacaaggacatggacagaaaacggaacacccgttagcaaggaaaagacggtagccttttcgggacaccgcaccaaccgtatagccaagttcacggcagaccgtgagaaactcttcagggaggtggcgttcgatacatttgtagccatcgagagttattgcatcaaaaaaggctacgacacctttttgtcgggaatgtgcgagggcttcgaccttatcgcagcagaggaagtcttgaacctcaaaaaggaatacccgcatatccggctgaaatgcgttgtccccttcaagggacaagccgagcggtacacccaagccgacaagcggcgttacgacaccattttggcgcaagccgatgaagtggtaaccttgcaggacggatataccgagggctgtttcctacgacgtaacgactaccttttggaaaactccgcttttctgatggtctattacgatgcggtagccgtgggcggtacgttctacactctcaaacgggcggtagagcaaaaaaagaagttcgcgaacgtatgctataaccgcaggtagcccgcaagggcggattttccgcccgctactttctttcgtgagccggagcggggaaagaaagatagcaaagaaaccgattgcccgaacgggacggtttgtcaaaaatcaaaaagaacaagaataaacaatcaacttaaaaataacagattatgaagacaaaagcaaatcaatcagcagcagagagaaacatcacgatggtagcgttggcagacattcagccgagcggtttcaacccacgcaagcgtttcgatgaaacgagcctttacgagcttgccgagagcatcaagcggcagggcgtgttgcagcccatcaccgtgcgccccgttgacgggacagaccgttacgggattgttttcggggaacgccgttaccgtgcgtccgtcattgcgggcagggacgaaattcccgcaatcgtaaccgagttgtcggacgaggaagccgaggaaatggcgattaccgagaacttgcagcgcaaggacgtgacacccgtggaggaagccgcagcctatcagcggcttatcgagagcggacgccacaccgtgcagaccttggcgcaactcttcggaaagaacgagaactacatccgcacacggctgaaattcaccgcccttatccccgaaatcgccgccctcttggatgcggatgaaatcaccatcagcgtggcggctgaaatctgccgatacggggaggacattcagcgtgaggtgtacgagaaacatttgcaggaagagggaacgtataacagttggcggggactgaaagccgccgatgtcgcaaggcgcatcgagcagaacttcaccaccgacctgcaatactaccgcttcgacaagaccgagtgcgccacgtgcgcacacaacaccaataacttgctgttgttccgtgatggcgggtgcgggcattgcgccaaccgcacgtgccttgccgagatgaacgcatcctacctcatggagcgagccgtgcaaatcatgcggaaccagccggaggtgtcgctctgccgtgaccgctacactaccaacgagacggtggtagaacggctaaccgcttcgggctacgaggtggagacccttgacaggtacaccgcctttccaagctgccccaaagaacccaaagccgaaaatttcaacgaccccgaacgctacggggaagcccgcacccgctacgagcagcaatgggcggactacatggagcaggaggaggaaatcacccgcaggagcggagcgggggaaatcaccgtctatgccaaaatcgggcagaaggagattacattctgttacgtggagaacgtgacagagaccgggacagcggacggaacacccgcacccgcaccgctctcacccgtggagaagttggagaagcaggacgagcgcaacaaggaaatcgcactcgaacgcacggtggaggacaccaagaagcaaatcctcgaagccgacatcacgggcggtaagttcagtgccgatgaagataccatgttgtacttcttccttctctcctcgctccggaaggaacacttcgcagccgtggggattgcggaagacaagccgtatatcacggacgaggacaagatggggattatcggcaacctcaccgtgaggatgaagaccatcatccgcagggacttccttgtagccaatttcaagggagcgtacgggaacaacaccgtggcgaccctcttgcttgacttcgcacgcaggcacatgccggaggaactcgccaacatcgaaagggagtacaacggggtgtacgagaagcgtcaccagcgcatcgaggaaaagaaagccgtcctcttggtgcaggaacgggcaagggagcgcaaggtaacgcaacccgaggaacaaccgcaacccgaagagattgcagcctaaggacaaagggcagggcggagaaatccgcccgctactttctttcgtgagccgtggcgaaaaagaaagatagcaaagaaaccgattttcaaactttcaaattttcaaacttatgcgaaccgtacaaagaacctatacactattcggcattgcggaactggaggacgaagcccgtcagagagcctataccgactggcttgccaagggaaacgattacccgtatgcttccgagaactgcgacacgctcgaagccttctgcaaccttttccgcatcgtctgcacaaactaccgttacgacagttgcacatacgcttaccgtttctataccaagcacgagacggacacggaggaactttcaggcgtccgcttgctggcttacctctataacaacttccatgcggggttgtacaagcccaaggtctattggacgaaagaccgcaagaaaagacgcaggagccgtatctccgtcacttgcgaatgccccttcacgggcgttgtgtcggacgaaatcatcttgcagcccctcatggacttcatgcgctcgcccgacacacggaatttcaaggaactcatgcgtgactgtctggaaaacttcttccgctcgtgccgtgacgattgcgagtattgcgagagcgaggagtatttcacggacgagagccacaggaataattgggagtaccttatcgacgggacacttttcaaggaaacggcatgaagcgggaaatcagacagaacgggaaaaccgtcctttacagcgaggacggtcatagcatccccatgatattcaacaaccttgtcgggaagaacctcaaaggcagggagtattcggactatatcgctttcgtagccattcccgacatgggatttacctacgggaagatagcgtattattcgaacgggaatttaatcgcaacgggggaaatcacgccataacattccccctctatgtttcatcgccgaaagtccgggacgggtagcgatccgcccggacttctttttttacccgcccgtgggaaaggattgacccgattttcggacgcacttctttttctttcggtgagccgtgggcgggaaaagacaaagaagcaaaaagaaaccctttgacccaccggatttttagccaagctccacactcattttttagcaaacctacggggaaaaacggacaagtggcaaggctgaacctgacggttttgcgcgcaatctccacaccttcgggtcgtattccacgcaaaagccttgcatgaagtccgctctttccccgtgccccaaagcaaaaaataaatgtttcacttttaattttttgcattatgaatacactgtcttttcctcaaatcaccgtaagttacaaggacgctgacgcatccaagagagttagaatccactcttccaaggagtcttacgacatcctcaagaccttctacgaggactgtatgcaacaccacgaggagtgctgggcgatgtacctaaacggcgcaggcaggctgctgggcgtctcgtgcgtctcacgtagcggcatgaacagcacggtggtggacatacgcatcgtcctccagacggctctcgtctcccacgcctcgggaatcatcctctcgcacaaccacccgtccggctcgaccgtggcgagcacgccggacaacaacctgaccagccagttgaagaaaggctgcgaggcaatcggcatacagcttttggaccacatcatactgaccggggacacttacctcagctacatggacgaggggatgctttaagcgtccccttttttattcgctatccgtttcgcacttcttttctttcgtgagcggggcgggaaaagaacaagaagcaaaagaaatctatagtaaaccattataatatatatcaagaattcaaatggtaagacctttcctatggttgctatccactaatatattgacaatatgcaaatgattatatgaatagattatccatgacagacgaagctcctttgctgtcatagatgcttactttgtagataagaaatggatattagattaccttgaatatcaactattatatacaatttcctccctttaatctttttgttattgtcaattccatttttgtaatctacgtaatgagctgccttcacgctttgggagtcaatgatattcatgctgggactctccttgcaatcggatataattccgacattaggatgtagattatcaagaagttctttaatcacaatcatttctatttgctagagagtaatgcacacttttccaaggtgtgaaatcttagggaagcatacgctgctaacaacctattttgagaagataaaaagaactgcatctacaatataccggagggaatattttcgttttttcttgtggcttagtgattttttctataacttgccattgtttatcagtgagattgcttgaatatttttacaactcattcgttttgaaactataaagttgtaaaaatgctctaatgaatctactggtttataatgttttagttggttgcgtaaaactattttaataacttttaattaagttgtattacaatggacacattaagactcaaaaattatagatgcttcaccgatactggtgatatagactttcgacctattaattttttagtaggaagtaatagtagtggaaagagttcatttattaagatgttccctttgataaaacaaagtgtaggtattaaaaggaatggtgtttttctttggtatggtaatgaggttgactttaaggattttgccaatgttataaaagagggacagtcatttctagaaatagaatttcttgtaaaaaaattccgtattcctcaaaggggatttcttaaaagtatagatgaaacaaatctaaaagtcaacatgagattatctcaaaaagataaagattttgactatttggaatctcttacaatatcttttgaagatcagaaaattaaaatttattacaatcccaaacgctcatctgtaaaaattgaagtgaatggaattcctacagaggaagattttgatcgtgtaattgcgacagaaacaaatagtttattaccaagattattatttatttccaaaaatgatattgctgatgattatcctatgtggtgtgagactaagttaagagagttgcaatttacaagttctttttctcagtatagaaaaatatcaagatctttgaaattaggtagtaaagaagatgttgtcaattatattacaaaacaattatctgttgaagacaaaaatactcatattaataaattatggttgaataatatttacttattgctacatattaataatattatagatggtataaatctaaacctattaagtctttcgaataacatttcttatgttggtccattacgcgctacgacacaaagatattataggtttcaaaactatgcagtagaagaaatagattctgatgggaaaaaccttgcaatgtatttgtataatcttgacaaggaatcattaaataacttcaaaaattggacaaggagattgttcggttttgaagtagaagtgtcttctgtgaatggaaacatggaattgattataaatgaagaaggaaaagaaaaacacaatatggttgatgttggttttggctatacacaaatattaccaatattagcaataatttggaagacattgtacaaagattttgcaataacaaactatagtagaacaactggtcggaatcaatacatagttgctattgaacaaccagagttgcatcttcatcctcgtttacagggattatttgcatcaatgcttgttacagtaattaaagaagcaaaagaacaagggagagatattcgtttcattatagaaacgcatagtgaaattataattagtcgtattggtcaaatgattgctactcatgaattcagtaacgaagatatcaatgtttttatattcaatgccgcaaatgaaggcatgcaaaattatatagagaaatcatattattctgaagatggacaactaataaattggccttacggtttcttttctgattatgtatttgaagattgaatctgatataattgaggaagctcttagcaaagacaatgaagttgctatagatgttttaagacaagccgctcttgctattcgaaatggtaaacacgcaattataatacagtatgctgatgtagttaaattattgaaacataaaggagtgttttctagatatgaattggcagcatttgacaaaattgggaaaatatatacccaattaggttcattaactagtaaaatgaaagtaaaagcttttgtaacattcagtaaacagacccaacgtttggaaaataatatttttataaatcctatcgaaacaagaggatttgaattttttgaggaaacacatttacttacagaaaaccttgaagatgcttttttcttcaaagcattaacagattattatcaaagaaaagaacgcataaaagcatgtacgatatgttcatacaatttaatgggtggaggtaatacgaccaataatgttattgaatatgagaaaaaattgaaacaacattttgttttttctgtggcggatagtgattttcattttcaaggtgataatcatttaggagaaactgcaaagaaaatccaagatagtttggctgacaatccttttaattgtgatttttatgtaatgaatagagtatgtgaagttgaaaatttgataccatatgaatgtttatggaaaaataacaatttgcgtaatcactgcattataacgaatcatcgtaaatttgatatgtctttttttgatatgaaagatggagtacatattcaatatctttatagtgatactgcttttaactattggaaaagtgaattagctaatcatgtacttgctaataagtttaagcctattgacaaagagcgaaaaagaagaacaaaagaatcttttagaaagaattataaagatcaagttgtaatacaaggatttggagtacatatattagcggaaagcttaaaactattacctcaaatacatcctgttgttacagcagaacatttaacaccaaatcaagaatatgaatggtatgaaataggaaaacacatatttaattggtgttgttgttatagtaaaatgattgtgtaattttcagatgtaacagccaataggtttttataagatatttacaaagacgcatcaaaactaaaatgactactttcaaaagttatagatatgtaactataacagttaaaagggttgtatcaaactctgtattaagtaatgatacaaccctttctatagtcttttaggatgctcaaatttcaaattataagttcatctttttaaaaattgaattttgacacctttgttgtaattttaggactatttcttttcattgtccacattgaacgaaaattctagctcgaccgcctgaccgtccgagtcctccacccagacggtgaagccgctctgttcgtccgacagcggggtgtaatagagccggaacgtctctttctccagcgggtagcggtcattgggcagcaacgccgtgccgtcgtccagtttgagcgtcccttccccgtcgaagaggaaccagcggatcgtgtaccgggtgtcctcccagcgtccttcccgtttcagctcgcaccgtatctccgccgtctcgttcactttcagctctttcgggacgggcatcgtctccaccgtgaacgggtatttcgtctgaatatccagcccgtcattacaggctgcgaccagcacgagggcggccacgatgtagcagcccgtgagtattttataaatcattgtcctcatatatacattattatattatatagcagttatcgaatcatgaaacgtattcccacgccgacctgcgtgtggaacttcccgcagtcgccgccgaacagcacccgttggcgaccgtttaccagcaagacaatcttgtccgtcacataggcggacagctccagcgtcagcgcacccccgtagatgaaattgtcttcatccgtgagccgggagccgtccggcagcaggctctcgccccagttcaccgtctcgtacccggcaagggcggacagccccagtgcggcgaagaacgtcttcttccggtctgacaggaagttcaggtaatagccgccctcgcccgtgagctggctcgccggatagaggcagtcccggtagccgtaccgcttctccaagtattccgcaccgaccacccaatggtgggcgttcttcgtgtaggtgctcaccgctatcccggcgtggtagccgaagccgtcgccgtttttccagcgcatgttgtccgacagcccgcccgtgagctgtatgcccctcattccgggcaggcaccgttgggcgtgtgcccggttgaaagtcaggcacaccccgaaaagcaggataatgaacagtaaccttttcatcgcttatttgattttcagttcgttaatctgtcttgtcgccacgaggtcggcgttctccacccggatggtctggtgcctgccgccgtccttctcgaacagctcgatgaccagcagcttgtcgtccggtatggtgaactgcgggacggcatacaccgtgcgcacgtcgcttttcccctccgtcaccagcacctcgttgtagctgcgcaccggatcgatcacccgctcctgaatggcggtgcgcttcggcactttcttgtccacgatcttgaaccggataaagtccgtccggaaagccacgttcgacctgttcctcgtttccgtgtggaaatagaacagcccgttgtgcgagtggacggatttcaggaggaactgcaccccgaagcgtttgcagcccaagtgccggatctcccgcctgtcctccttgtagatgctctgcatgatcagcttcaccaagagcgggctttcgcctgccaactcacggaaatggatgttcatgcgggtatgcgaaaagtccgtcgtgtccccgttctccaaaaaatccttcatctcgatgttcagcatctccggctcatgcgcataccgggcattgaacgagtagaagctcccgtcctcgcagatgacggaaaagttcgtttcccccggaaacccctcggtcgtcgccttcacccggatcacgttctccgcaccgtccgctttcccggcgataatccggtcgcttcccaaatccacgtaccgcaccgccgaggggaagatgatatgcaccgtcttggcgaacgtcacctgcaccccgtggggcgtaaccatctgccggtagggtagcttccgtgtaatcccctgatacaggtcgttgcccgtggtccgctgtatcgtgtcgttcacctgtgcgttcgcacccgtcaccatgcccacaagcagggcgacccatccaaaaatctttttcattgtctttactttttaatggttttataatctgttgatttatagttgtttggcgtagagcatcagcggatcacccgctttcaggtgcacctttaccgtgcggaacttcttggcgaggtactggctgccgccctgcatcagcccacgggtgatgtccatcgccacctgttgcccggcgctccgtgcgaacgagatgctcgttcccagcccgccgccgatgttcgccatcgcctcctttgccgcttcccgctccagtgaggtttctatgcacagccctttcattccctcgttgtcatagaccgccaattccaccggcaatatgttaccttggtactggacggacgataccgtgatgtcgagccgttccccctgcaccttgcctgtaccggataccaccgtattgcgtgggatggtcaggtttcccgcctgcaacggttcgagcagccggagcttcacctgttgaccgtccataaccgtctggtcttggtggatgcaggcggctatcgtgttcttcccgagggcgtacccgctgcccaccgccgtgttgaagccgtagttcctcggctggctgtaccgccgcatgaactccgcatcgcttaggggctgtcgcagccccgataccgtccgctcccgtgccgcctgcaccgccacggcgggctgtcccagaccgttgccgccctgcccggtggcgggtgcctgcacggttgcgccgtcctgcccgttctgccccatgtacttggcggcaagctcgtagctcttctccatcagcgccacctgatcgtcgattccgcccgcctgccgttccctttcttccagtttggcggtcagctcctccacctgccttttcagctcctccttttccccgtccaccttcggctcctcgtagaacgagccgagtttccggttgatgtcccggtaggcggcgatggaggagcggccgccgccgttgcccgagtagtccctgaacggttcccgttccggctcgctgtccggcagttccatttccaccccgtccgcatcgctctcttcggagaaggcgaagtcctccagcgagcgcaccttctctgcctgccgcctttccgcctgcgcctgctcgtaggctttccgcttgtcgccgatgattccgtcgttctccggcagggggatgtcggcgttgaacgcccccacggtgtcccggttcacctcccgcttttccgaaggcgcgaatatcagccacatcgagccgaggaacagcaagcccatcagcggatataccatcagcttcttccgttgctgcaactgtttcggcgtgagtggcttggctgtcttcttctcctttttcccgccgcccttgtcctccttctttccgttccccgtctccggggctgcggcatccgccatcgtcacgtgctgcgttgccgttgctttttcttggttctgttcttccatcatgtcaaaaatttatggttgtcctacattctgattcttctccccggaggcttccttctgcctgtctctccggtttgccgcttgccgggcggctccttccgttcccgtttgagcgatgccgtggggcttgcccggttgtccgcccgcaggtgcgcagccttccgttcccggcttgccgccttttcggggaacagcctcgcttccagccctgccagttctttcgccgcacgctcccggatggcacggttgtggcgtccgatggcggcttccgggtagtcacgggagaggtccccgttgtcctcgctcaggtggtagtcccacctcagccgggcgataccggcaaagtcctccgtcagcccgtacttctccaccgtctccttcgggacttcccgctgaccgtcccagccgtggcgggcgagcccgtggagcaatgcccgttccgccttcaccgcttccagatagtcgccgggcagtttgccgcccgtcttcctctcgtaaagggcggcggcttgccgcatcagctttccccgctcgtccgcctcccgcaactcgatctgttccatgacggtgtggttgtcgccccgcatctcctcgttccattcccggctcagttcttcgagcctgcggtagccttccgccagcccgtgacggatagctaccgagtcgtccggtttctcgcctttcagggcaagccttttcagtgcgtcgaggtctccctccctcatgcagcagttcagcagccggtgcgccgcatcccgttccgcctgcgcttcgggggatagcggctgcggggcgttgcgcctcgtgtactcgtgctccagcaccttgtattgcgccgccagacgcagcatcgggctttccgccgcctccctcacgctccgggggattgccgtcccctcacgcatcccgtaacgggtctctttcagggcgtccatgaccgcccgccattcgggatagcccgtctggtacacgtaccggaagaacctgtgttccagcagcagctccgcctgtttccttgtcacctccgggcagtcccggtagtccctgacggactggaggattgcgtcggcatccgcacgcctctttttcagcaggctcccgaaatacgccgtcacctgcctcatgttccgctcctcctgccgctcccggcggtggagcagccactcactcaacttctccgccagtcccatgccgtccgctttcaaaagggttgatgatactgtcattgggcaattgcaggcgcctgatatgctctatccccagttcctttccgtcgttcctgccgatgcggtagatggaggagacggtcatatagaccgacagagcgccgaacgccaccagcatcacgaggatgattgccacacgcatgtcgggcgagatacgcccggcgaggcggcggagcttcccgtccgcccagtcctgcgcctttacgatgaatttccttatcatagccgtcagcgtttgagggtctgcaaatccttgttctccgtgacctcgaagccctcgatgatgaagccctgcgggttgttgtcgctcctgaccgcatccagcaggcggcagcgggttacaaggctgcgttccgtaacagagctttcccgaaggatgatctgccgggcgaatgtccgcacgctgtacgggtacttgtcgaagtcgcaccgcaggctgtctatctctatcatctggttgatgttccccgatattatgcggttgtagtaccccttttccgagaggtccttgtagtagttgaaggcgctcttgtccgccagcagcagcgagcgtttgatattcccctcgatagccgacttgtcgggcgagagcgtgaagaacagctcgtggaagcggcgcacgtgctcccgtgcctccaccgggcggttctgccgcacgtcctgcgagagcgccagcatcaggctcttgccgttgtccagcacgtagatcttctgccgctgcgcctcggcgaagctgtacgacttccacagggcgaagcccgtcaccacggcgcacaggctggcgaataccagcgtgaagagccgtatctgcctgaagctcgtttcgatatttttcaaacttttaaattccatgtttccggtttttttattcgttatgactcattttcttggggcatccgccgctacttgacgatccttccggcgatgttccccacggctgcgcccgcacctgcggcggcgacgttgcctaccttcgtggcggtctggttcatcgcacggttggcgtggctcaccccgcccgccatgatgatccagttagcgacggtcggtatggtgaagtacccgaatatcccgatgattaaaaagatgatgtacaccgtgttcgagctgtccgggatgaaggtcgggtcgctcatcgcctcgatgtcacgggtgagcatcagcacttggatgcgtgccagcaccgagctgaacaggtcgctcacgggcagccacatgtagatggagatgtacctcgttatccactgcgtgagcgtgctctggaacccttcatagaccgagagggcgaacgctatcggaccgaggatggagagggcgatcaggaagaacgtccgtatcgtgtcgatcaccagcgcagccgactggaacagcagttcgagcagttcttggaaccacagccggatgctccgcttcatgttgtactccgtccggtcaatgtacatcaccgccatcgtcttcaagtccttgggcgaccagcccagctcgtcgagcttcttgtcgaagtcctccttgctcgccagatacgccttctccgggtcacggcggaacgcctccctctccagcgcctctttctgctcccggtatcggttcatgtcgaaggtctgtgattcgagcatcccgtggcagcccttcaccacgggcgagagcaccgtgttgatcgtgccgatgacgaaggtggggaagaagaggatgcacagcccgatggcgaacgggcgcagcagcgggtacacgtcgatgggctcggcacgggcgagcgcctgccacaccttggcggctacgtagaacagcgcacccagcccggcgattcccttggctacacccgtcagcttctcgcagagcggcatcatgtcctgatacaatgcctgcaatatctcgtgcaggttcgtgaagtctatcgctaacaacatagtcctgtatttttattatatgtacgcatacattattatatatttgcccgcctcaccagtaacggtcttccgcatccccgtagagtgccaccacccggtcggcgtcctttttcttcttcgcccgcaggtagctcaccgagatgttcttgtccgtgtaatactgcacgaggttgcggtactccagcagccgcttgtagctctggtcgatgatcgccagccgctcggcgtccgagagcgacatccccgtcacgttcaccacgttcttcaggtcttgcaggatgtccgcgctctcggagagcagcttggcgtacccgaacgagatggttgacagctcgtccggcgtgtagttcgggtcgccgagcatcttctggtagttgcgcacgtagatttccgagatgtccgccaccatctcgatggacttcttcaccttcacgccgcctttcaccacgtcatgcaccgccttgagcgcatcgtaatacttccgtccctgctcgaatatcttcgccgtctccttgaacccgtccagcgtgtgctgtgcggtggcggaggtctccacgatctctttggtcgtgttgatgatgccctgcgccagattgccgggatcgtgtacgacccactgggcgttggccgcacctgccgtcaggcacgccacgcccacgatgattgcctttatcgttctcatgtccttactgttttagggttccgtcactctttctcctgtactctccgcccggcgacagccggatgcggtctttctcccggtcatagtccatcatcacggcgaagcccgtctcgatgaacagcaccccttccgtttcccggacgaggtaggtctccgcttcactgccgcccttgtggttcctgtgcatgaccgtcacacggtacctgccgtcctcttcccagagggtgaagggcggctttccgctcgtgctgacccattcgctgcacatcttttccaaccgttccgcatttgtctccttgcaggaaatgacaaacgccagcgccgccgtcaccgccgacagcagcaggattaaattcaatcgtctcatcttgattccgttttttaagttttacaaaattttattctctccatgccgtttagccgtttgtacatccagccgtttagccagccagccgtttaaccgtttgaccgtttagccgtttggtcaaccatccgacccttcagccgttcgtccggtcaatcaacaacccgtccggcagcctgtccgccactccagcgcatcggcacattatttatacttcgtctctgccagccgcttgatggcaagctccaagtcaccgcccagctcttccgccagtgcgaacacctccgtcttctcgctctcctcggtggtataggtcaggtactcggcagccgacacctccgtggcgtacaccgccgactgcaccccgttcagaccgatccagacctccttgtacttccgtccgggatggttggcgaggttgatggagagtatctgcgacttctccttgtccgtcagcccgagcatcgactggatgccgtcgaacttgttcatgtacttcttctggtccaaaaggatcttgcagtccgagttggtgatgatagcctccttcacgatgggggacgagatgatgtcgtccacctcctgcgtgacgacaatcgcctcgccgaaatatttcctgacggtcttgtacatatatttcaaatactcactcatactcggcgaggaaagggctttccaagcctcctcgcagatcagcatcttccgcacccctttcaggcggcgcagcttgttgatgaaggcttccatgatgatgatcgtaaccacggggaacagctcggcgttgtccttcacggcgtcgatctcgaagacgatgaaccgcttgtgcagcaggtcgatgttctcgttcgagttcaacaggaagtcgtaacgcccgcccttgtaatactgccgtagcgtggtcaggaagttgtcgatgttgaaatcctcccggctcaccttgatgtcccttgccgccagctccttccggtaatcgttcagcatgtactcgtagaaggtgtcgaacgagggggcgatgtcccggttctgctgtatccggcggatgtacgccgacaccgcactgcccagctcgccgctctccgtcttcgtgaccttctcgtcctcgcccttccacagcgccagcagcagcgtcttgatactgtccttcttctccacgctgaacttgtagtgtaggctcggcactcgacgccttgtcgtattgctacgacaggttttcgagagcctgcccccgaaccgtacgtacacctctcgatgtatacggctctccgttgataaatgcactttatttttcatgttcttgtatctttgcgttgcaacttggacatacagcgagagtttttcggtttctgtttagcattattctgttccattcgtactcctttgatagagttttgagtgtacggacgtggtgcataacagtaggactttctactccgcagagttcacaacgattagttttgagcctctccaccaatgttggaggtggcacaattacggtaaatggttgtgtgtcgcaatttgtgtttgcgtttgttgtttggcgtttaaatccatcatcatacagtattcggtactgttgtcgccctttatcatccttgtatgggattataaactgcttgtttgtctcgtactttttcttcaacttgcttattgtacttcttagcttttgagcaagtgttagatacatactgtactccatgatgtaaccaaacttagaacatgtggcagatacattattagcaatactgtaatagttatagaacccacgtatttcccaattgaattgggctaatatatcgtgtggttgcatagctgttaaatgtgaccgggattttggcttccagatttctttgccgtttgcttgctcgaaacttatggcatcgtactcttttagcttcttctttacggtctctattggcagcgtaagcacaactctaccattaaaatcacgctggagaactcctttacgatttcgtttcatcgcataggatttcctcacagagagttcatacccaagaaattttgcagtgtcttgtgcatgggttatcaacgttttctctgctgagagttcaagattaagaacatcgctcatgtatttcgtgatgtcagctttaatcttttcgcaatctactttagaaccaataactccaatgatgaagtcatctgcatatcttacatacttcattcttctgtaattttcgtccatatcatgactacatggtatattacgcatctctatttgtaatttctttgctttttctgttagctctgcctttacacaagggtcagtttctactttaagtttctttcttagatttaccgcttgggtattcttttgaaagtagactgcattacgtctttttttctcacctttattgaacctttcaatatactcgtttatgtacttatcgaacttgtcgagatagatgttagccaatattgggctaataattccaccttgaggtgttcctgagtatgtgcggttatatttccaattatcaacatatcctgcattgagaaactttctcaccaaccttaggaaacgttcatctgatattcgttctcgaagagtatctatcagtatgttgtggtttatattatcaaagaaacctttaatgtctccttctataaaccaacgtgttcctgtgaactgatgttgaatatgtgttaatgcagtatggcaacttttgtatggtctgaagccgtgtgaggtgctttcaaaatgcccctcataaatagcttctaatatcatacgtgctacctcttgcactaacttatcctcaaaagatggtattcccaatggacggtttccgccattctttttgggaatatataccctctttgcaggtttgggttgataagtctcatttttaagactttcaataatatgttctattctctgaatgctcatttggtctattgttttgccatctgcgcctgatgtcatgttaccttgcttggcgtatatacgctgataagcaacataaaacatatcttcattgaataggatacgatacagtctttcgtacttatagtccgaaactttgctgtgtaaacataaagtgtttaatactttctctggatttctcatacgtctctcacgttttcctttgatttatattaaaattatcaactgcttcccttcgccatgtacaaggctttcccctgttcggactactatggaagctccgttgccatgccgaatattcaagagcaaactctatagccttacggcgtttcggtttaggcaatccccatttagttagcgtaataactattagcgtgatagactgtcggatgcgacgttcgctcttttctccgtttattacggttgtgctgtaattagttcttgcctcttctcccgaacgactgagaaaaggtatcacagtatggcgtatataattgtctttcgccatcgcttcttcatttgccactgagctatcgttcaaccaatcaggcttcatcctcgtgtctatcgttccccctcgcaattcagtcgcaacatgacaatttgttgacttatcgcttttccaacatgctgcactccccctcgggtttccctttaggataagttggctgggagtaggtttccttttcattttgttacatttatgaaatttgaactctaacctaatctcttgctaaagagatatttactacgcttccattatgggcgcaccgtccgtgaagaaggggttgaagctgatgggcttctcctccgtgtacgtgtagtaaatcccgtcctcgcccttggtcttgcggtggatcagctcgcacagcccttggtacgagttgcccgtgtcgatcagcacgatgtggctgttttgctcgtaatactggcgcacgaggtggttcatgaagaacgacttgccgcttccgctcggaccgaggacgaacttgttgcggttcgagatcacccctttcttcatcggcaggtcgctgatgtccagatgcagcggtctgcccgtcatcctgtccgccatcttgatgccgaagggcgagagcgagtccttgtagttcgtctcctcggtgaagaagcacagggcttgcgggatgaacgtgtagaagctctcctcgaaggggaagtccccctcgttgcccggtatcgccgcccaaaagagcgtcggcacgtccaccgtgttgtgcctcggcttgcactccatcagggcgagctggctgcccacctcgttcttgatgcgcctaagctcctcccggtcgtcgctccacgccatcacgttgcagtggcagcgcaccgaggtcagccctttcgagtgcgcctcgttcaggtattcctcgatccatgccttgttgatctggttggagcgggagtagcgggagagcgagtgcatgttccgggcggtctgctcgaagcgtttcaggttcttcccgtggtcgtcgatgaagatgtactggttgtagcagtggttgcagtccagcagcaagcccaccggggcggcgaacgacaggcggcagtccgagcggtcggtcgagagccgctcgtaacggctgtccgtcgccaccttgcccggcaggtcttccgtgtccgagagggtgtgcaggcagaggatgtcgtcgccgatgcgcatctcctccgggttcaactggatgtccttcagcaccgtcgtgtcgtgctgcgagagcgagaggtacttctccacgatgcccgccgccgcttccgtgccggtgatctcgtccgtggtcaggcggcgcagcctgaccagcccgctgtcgttcatgatcttctcgaactgaccgaccgcttcgatgaacctcgtaaccgtctcccggtcctcgatctccttggggacaagcctgcccttgcagagggtggagaacgtgctttcctgacggctccgtgccttcgtcgtcttggtaaggaacaggtagcagaagtggttcaggaacgggcgttcgttgaagtgcctctcaaagctccggctcaggaagctaaggtcgtccctgtccgtttccggccggtacttctcctcgatgaagaagtcctgcttgtgtacgatggaatactccggcagcaccttcaccgccttgtgccaagccgagtggaccgcctcgtactcgctccccgtaacggagaacagttccggcagttccaccctgaaggcgaccgtcacgtccgcctccttgctcacgatgcagccgttctccaccgccagcagcgggaacttgctttcgagcgtcgccgctttcattacgtttctcattcttgccagtgtttaaaggtgaataatcgggggattttcagccggttcaccacgtacctcggatgccgcctgcgggcggctgccttcatcagcccgtgcgtgccgtaccgggcgttcagccggaaggtcagccataccagcagcgtagccgcagccacgccgaagccgatgcacacccactggctcacgcccgccatgtacaggatgacgaacaccacgaacacggcgagcagaccgccgcagaagatgaagaggtactggctttccagccccttgaactccacgttcctgccgatccccttgttgatttccaagtccatagtccgctgttttacaggaagaacgaacggaggatggtagccgccacgatcaggaagatgcaggctccgaaccagcttgcggcgactttgctcacgtccggatcgccggcgctgaacttcccgtacactttcaccccgccgatcaagccgaccaccgcaccgatggcgtaaatcagtttcgtccccggctcaaaatacgaggtgaccatctgcgtggcttcggtgatgcccgcctgcccgtttccctgcgccattgcgcccacggcagccagtatgcaggccgccgtaaaaaagattcttttctgtttcatttgtctttaaaattttaattaaacattatggttgtccatcagccgggcgacacgctcacgtgcgccctcgaactcgtccagcatcgcctcccagatgtccgaccccatcacggacgacagcacctcacgggcttcccgctccgccttttcgcccgcatcgtccgacaccagtacccggcgcacctttttcaggtcatcgaaggagtaccccgtggcgaagtcggggttgccgtccgggtaataagcccctaattcctcgtcctcctccagttcccggatctcctccggcgtgggttcatagtccgtctcctcctcgtcctcctccggctcgatgtcggagtagtccgccccgtcgtcctccgctgcgggttcgtccacggctccggctgccgcttcctccccgtcctccgctgcgaagggcaggtaggtgctttctcccatgaccgtgtacggctcgcccggttgccccggctcctgatccggctcgtccgtgccttcgtccgtctccgctgtcccgaacatcccggcgatgtcctgccggtagtatttccacagcacggcgaggtaatagagcagcaggacggtgagcgataatttcagtatcatgccgtttcctccttccttttttaaaagaggttctccagtttcccggcgtatgccgcctcgatctcctcccggtattgctcgaagtgctgcgccagcacgttgtcgatgtatgccgagagcgacaccttgccgcccgtcagcatcaccgagattttggcgatgcgctcgtggtactcacggcgcacatagaccggcttgccgtagcgggcggggatgtccatgcctttgaggaaggtcgtctcgtagtccgcctgccttcccttgcgccgtcttgtctccgccgccttcccttcctgcgccttctccaccggcacggcggtttcaacctttccggttcccggttctcccgtccctgccgcctcgcccgccatcatccgcatcagcagctcctcgtcgatgggcttctcattccgctgtttcttcatagccttccagtttgaggatggttgctatctcacgggtcagttcggggatgccgctgcctgccagcatccgcctgtcgggagccagtagcgtggagcggaacaccgtccgtcccgtgccgtccgcctccttgcggaagcgtttcgtgtcggggatgcgggtttgcagcatcggcagccccatgtcggcgaccacctgcccgtacttctcgtacagcccgctcgtttcccgcttgtcgacttggttccagaaaaggtaaagccccttcaggcggctcgtctccttgcccagcatcatccgttgcagcacgtcgaggaaggagagcgtgctttccagcaccgccttgtccgcactcaccggggcgaagatgtagtccatctgtgcgatcgtgcgcaggatgcccgccgagttcaccgtgcccggcaggtcgaagaagagcaggtcgtagcagccttccgccgccagctcccttgccgtgtcgggggcttgttccacccggcacttgcgcaccggataggcggcacgccccggctgccgcatctgttcgtaagccgcccgtttcaggtattcgttctccagtaccgcccggctgtcccgctcccgcatctcgtacaggctgtactgcgggaagtcgcagtcgatcaccgccaacggacaccccaagcggtagtgcaggtagcccgccaccagcaccgtgatagccgtcttgccgctgccgcctttctgtgtggcgaaagccacgttcaatgtctgtctgtccatatcgtcattctgttggttattcatccggctgcccgtgcagccgcttctctgttcactcaatcggtcagcctttcagccactctgccgttcattcatccgttcagacatccggtcatacattcagcccggtatccagccgtccatccaatcatccggctgttcagccgtttgaccgtttagccgtttagtcatttagccgtttggctgtttagccaatcgtccggctggttatccggttgtccgtccgtttgtccggcaagaccgtcagccgttcggctgtccgtccggtcggctatccggctgtttccttgtctatccggacagtcgtttcaccgcttccacggcgcaaaggaatatcaaaataccggtagtttatccgtttgattatcagcgtgtcgtgcattgtctttccacccgtaggtttgtcgcatccgggcatggtgtccggacgggaaaagggctgttactttgcaggcggaaaccaaaatggaataagaatgaaaaagagcggcaaccgcccgagggagtgccccggcactccgcagcaggcaagggcatccccaatctgtccggcaggacggattttattttcaaacgaaaatggcaagttgtgtgctgcggcactcgaaatgaatttcgtgcctcaccaccaccttgccccctcgatgtggcatccccctccggagtcgggggctgctcacgggggagagccgtaggcatacggcgttttcagaccatgtttcacttaaaattttacaggatgatggacaaccagaagaagtatgcgggcaaccacgggcgaaagcccaagcccgacaagatgcgccaccgctacgtgttccgtctggacgacggggacaacgcccgtttcctcgcgcttttcgacgagtcgggcaaggcgaccaaggcggagtttatcgtttccgcacttttcggcagggagattaaggtcattaaactggataaggggacgcaggatttctacatgcgcctgaccactttccactcgcagttccgtgccataggcacgaactacaaccaatgcgtgcgtgcgctcaaatccaatttctcggagaagaaagccctcgctttcctctacaagctggagcggcacaccctcgaactggtcgagttaagcaagcggatttccgcactggtggaggaattccaaagcaaataccccgtccgatgatagccaagatctcgcacggcagcagcctgtacggggtgcttgcctacaaccagttgaaggtggacgaacggcacgccgacgtgcttttcaccagccggattatcgagccgcagggcgataacccctacacgatagggcatctttcccgctcgttcggcgactatttgaccgccaaccgcaagaccgagaagcccgtcctgcacatctccctcaatcccgacccgaaggattgcttgagcgaagagcggtttgtcagcttggcggaggagtacatgcggcgcatgggcttcggcgaccagccctatatcgtctatcgccacaacgacatcgggcgggagcacctgcacatcgtctccgtccgggtggacgaaaccgggcgtgccatttccgacagctacgagcacgggcgttcgatgaaggtctgccgggagctggaacggcagttcggtcttgtcccggctacgcccaagcagtggaaagaggggctgcccttgtcgcccgtcggttacggggacggcaacctcaaggggcagttggcgggagtcatccgcccgctcgcccgggagtggcgtttccgtacactgggcgaataccgtgccgtcctttcgctctacggcatcacggtggacgaggtgaagggggaatacggcgggcgggagtatcacggcttgacctattcggcaaccgacagggagggcaacaaggtcggcaagcccttcaagtcctccgtgttcggcaaggaggcgggcgtcgcagccctcgaaaggcggatgcacaacgctgccgcatgggaaaagacccacaaggaagtcgccgccgccaccgccggaaaggttgccgccgccatgcagaccgcagggcatgaccgggcgcagttcgagcgggaactcatgcggcagggtatcggcgtggtattccgtcagaatgaaaccgggcgcatctatggggcgaccttcatcgaccatgccgccaaagccgtcttcaacggctcccgtctgggcaaggagttctccgcaggcgtgttcaacgaccttttcgccgggcaggaaggtattcacctgccgcaaccctccgccggagtggaacatcccacccggcagcaggagcatacgggcgcatcccaatgggacggacaggataccggctaccgtcccgaccacaaggacggcaccacccagaacgtggcggccgctttcaatctctttgcccccgtacccggcggagcgtccggcgaccagcccgtacctccgcagcgcaaaaagaaaaagaggcgcaagtacggcaggcagcaataatcaacttaaaattcaacgaattatgcaaaacgaagacgatttgcgtggactcgccaaagtcatggagttcatgcgtgcgataagcattttatttgtagtcatcaacatttactggttctgttaccagtccgtccgggagtggggcatcgacatcggcgtggtcgataggatattgctcggcttccagcgtaccgccgggctgttctccaatatcctctggacgaagctcttcgccgtgctgttcctcgcccttagctgcctcggcacaaagggcgtgaaggaacagaaaatcacgtggcgcaggatcatcctttgcggcgtgtccggcttgctgctctttttcggcaacgggtggttgctcacccttcctctgccgtttccggcggacaccgtgctgtatatcgccacccttaccgccgggtatatctgcctgctcatggcggggttgtggatgtcccgcctgctgaagaccgacctgctcgaagacgtgttcaacgtcgagaacgaatccttcatgcaggagaccgagctgaaggagaacgagtattccgtcaatctccgcacccgcttttggttccggggcagggcgtatgacggatggatcaaccttgtcaatcccttccgtgcgacgatggtcttgggcacgcccggttcgggcaagtcctatgcgataatcaaccagtacatcaaacagaccatcgagaagggctattcacttttcctgtatgatttcaagtaccccgacctctccgagatagcctacaaccacctgctcgcccatttggacggctacaaggtcaagcctaagttctacgtgataaacttcgacaacccgagggagagccaccgctgtaaccccatccacccggacttcatgaccgacatatccgatgcctacgagagtgcctacacgattatgttaaatttgaaccgcacgtggatttccaagcagggcgacttctttgttgaatcacctatcattctgttagccagtattatatggtatctcaaaatctacaagaacggcaagtattgcacctttccccatgccatcgagttcctgaaccgcaagtacgccgacattttccccatcctcacctcgtacccggagctggagaactacctttctccctttatggacgcatgggaatcctcggcggtggagcagttgcaggggcagattgccagtgccaagataccgctttcccgcatgatttccccggctctctattgggtgatgacggcggacgatttcaccctcgacatcaacaatcccgaagagccgaaagtgctcgtagtcggtaacaatcccgaccgtcagggcatttacggggcggcgttgggactgtacaactcccgtatcgtgaagctcatcaacaagaagaaacggcttaaatccgccgtaattatcgacgagctacccaccatctacatgcgtgggctggataacctcattgccaccgcccgaagcaacaaggtagccgtcatgctcggctttcaggattttagccagttgaagcgtgattacggagacaaagagtccgctgtaatctgtaataccgtcggcaatgtatttgcaggtcaggtagttgccgaaaccgccaagacgctctccgagcgtttcggcaaggtcttgcagaaacggcagaacatgaccatcaacaggaacgagacctccgtctccatcaacacccagatggacagccttattccggcgagcaagatttccaacctcacacagggtatgttcgtcggggcggtcgccgacaacttcgacgagcgcatcgagcagaagattttccatgccgagattgtcgtggataacgagaaggtcaggcgggagaccgcccgctacgtgaagataccgcagatcatcgacttcaccgacaaggacggcaacgacaccatgcagcagcagatcgacgccaactactaccgcatcaagagcgaggtcaggcagattgtcgccgacgagatcgggcgcatcaaggcagacccggagctgtcgcatctgattaaggacaagtgaggataaaaataccccgtcggcaagaacaagccggcgaggttctttttatcgggtatggtgtttttcggcatgaagtaatggttaagtgggcaaaatacattatttttgtaatgatatggataaggacaatcgcaaataccggatctgcttcatcgactatatgtggtatgtagccgagatatggcacgaaagggagcataccaaccttaacgggcgtatgctgttgttcttttgctgactctttgccatactcgtaccgcttggaacaccgttgatgtttcgctatttcagttggattgttgcttttgccgtagtgatgattctttgctttcttcccgacttgttctgccagctccgctacacagccgggcggcgtgaagcgctccgtgaatattacggaaagatgaaacatcccggcaggaagctcgccaaaatagtccttatcgctatcgccctgaccgtggtgaatgtcgcactgatgtttcaccttggatttatacattgggcatgataaacggcaggagaataagcatcggttctatctctgggattacttacatatcggctaatttccatttcacggcagaagccgaaacatcatcatcgttccgctttaagcggtagtgctatttgttactaacgaattcattaattgatgctttcattttttctacaattacatcaatatattgttgtggaatgtttttatttttatagttctcaatagcatcaagaatactttgtttcaatatctcaacgcattgagaatcatttgctgtttcaaatttatcaaatgggagtagaatttccaattctatccgattacgttttttcgaatatctacttaatggatttgcagtaaatccttttaagcagaatacatagaaacttagttcattaatatatgaaatatcacatagacaatccatatattctattacagagtttcttgctttacgaaacttatcagaaatactatgttccaattcacctccaataaaaactttcatacaaatttgttatcgttagtaatgtttggcggacaatcaatctttcagagagatttatctgcttgttataaacctatttgaaatttgtcagtatatcattctttttattggaagacaacatttctaataaatgattaaagctatcgcaaacaaattctgccgaatcttcaaattcaggttcaactccataatagattttaccgtaattttccggagataaatctatgcacaaatattggtatccatcttttactgacataagaataggaatatggctatcccaaaacaggcgtatcatatcacaggattccttatcatctgccaacgcctcaagtcccatcagctcaaattcattccaacggaatccgctatcgctttctccgttaaaatcctctatggaattaaaccaaacattatcactttcattcgtgattgtctgaaaccgttgtaaaaactcctgatagtccgcaggaagttcggagtaccgattttgtaaatcagagcttaattcttttctttccaatcgttctgtaacgatgaatcctatatttttcagtgcttcaatcatatttttattttacgagtttataatgggttggtgagggacagcgtttagctgttatatcgaccttgttagtaatatatttcacagagaataaatgtaacataactcccaaattatgtcaatagtggaatttagcccaagtttatcaaagaacattttcatttcccctgataggctattattgaaaatattttcaataataacccggcagttttttttactgtttagtatcttcttattgtaattagcctgttccaagaccatcttataaaacggcatgagatataaggtaaacacctcatatcgcccattatgaaaagaaggtgtcttcatttctatttgagacacattaattaaattaaccaaactgccgctttcaataatattgactattttactttcgcattctttgaaaaaagtttcatcgcaggtttggttatatccaatctggatcttaatgtttgctgacagattttcaagcccatcatccggacgatcaatgacaccaacccacattgttacttctaatgagccattatgtttatatactcgtgctattatataacaataatatatatcaatgatatgtttacttaaacatataagatcatcataccataatttcttagggcacttaaagttatactcattgagtaaacgttgaaattcatttataacactgtgaaattcagatttcatatttattactaatggtttgcagcgttccgccttattcagtcggtagtgctgtttgttataaactcttttttctttattcttttgccgttacatgtaaagccataagtaaaagctgcatctatggtttgttttgcactctcaagaatataatgatacaaattatcatatttactaaagcatggagaaagaatgtagaagtttttaatatttaaaggaatataaatccccgtcatatcggatattccatagcgtgcttcctccaaatttggtactggtatggaaatagatatttcaaactctttattagatgggaaacgttttgcccgtttgaaaatcccaatccccccattagtatttcgaagatttatctgtatgagaagtttccaatctcccaaatcatctaagttgatttggttattgtaatcttccatataaccattcaactctcggtaaattgagcgcagtaagtccaattctccaagttcagggatttcactacttattaaaactgcatattgattattcatacattcatccttatatccagagtttataatgttcggcagcgttccgcttattcagtcggtctgctgtttgttatcaacttatattttgtctgacaacaccatgttcataagccaaactatcacattctttttgcatattggtcagaacatcttcgaccacttttaaggaaacttcttgtggtacatttatggatacgaatgaagggagattagaaatctctaccttgcatcccatatcaagtagtttgtctctgaccatctgcatacgtttatcgttaaaatgtaccctcaatgtgctatttccagagggattcactatggattgaaaatgatattcgccatcttcttctgtaacacatatctcatcccccaaactgattccataggtatagaatggcacattatcgacaatataggtatcattacttgcctttttgcaccacaaaccttcaatagaaaatggtggatagccatcttcatcttgttccaagtggaatagcacttttatatgtttgtcttttttcattttattcattaataagttgataatgtttggcagcgttccgctttttagtcggtttgctgtttgttagtcgcttattcccattcaaatgttgataagtaacgaagaccattatagtccgcaatctcttcaacatattttttaggtatgccaagatgacctttcatgttttctttaagaataaaaactttttggtttttctttttatctctaaaaccattcgggatatagcagaaagtacaattatttgaggcattattaaggccatttctatttaatgatttttcaacccaacaatcaagtacattattgtctattataactgattgaattaattgaacagaattcattgtacatgttttgtcaattttaattcttaaaaactctggataatagaattttatacctaagtctttacagaactgacaacgatgttcgggattgggacgctttttgctctgaccggattcatacgcttccaactccttgaggtattgctcttgattaaaatactccataaattcggtttcatttttatcggtatgcccaatccatgtcatatatttcaaaccggcagtcgaggctgttgtaccagtcggattaagttcaaaaataaaagagcccaagaaggataccgatacggtattcgtcgctttctgcaatgatataccctcatggctattatacatgattgccgcatttgcgacagttatttttttcgctcttagtatttccttgattttatctgtgtctgccggaataacattcaacagattctcaagtccttcagaagaatatttcataataagagaatcttcgtcatagtccattacaccaagctctttacagaactggcaacgaagttccttattgtcttcatcgtattctttccaccattgacggaaagccgattgatccatatatttctcaaagtcagcttcggaatcgaattgaccgacccatatcattatcttgctcattttctttttttatttttcaagcgactaatgtttggtggctaaccgaccttttctggggaggtttagccgcatgttaatcgtctttattggattgaatgtattattaaagatacttcgtctttttggtaatgataagtttttattatacaagatgttttttgtagtgataaaaacactttaaccgatgcttcacaatagggagacaaagaatcaaataggactaattcagtagaatcccattttacttcaacttcttctatcggttctgccccagttactatatcattctccagaagtttttccaccgttagataatcgggagcatacttccaacgaattattaaaattgctccatctttatttactatgcgtgtagccatcggttcatctcccattaccaataagacatgattgtctatatagattttccccaagtaatctgttacgctacatatagcattgtagttttcttgacccttccattgatgggcatattgttgctcaacaatgacaaatgggcttccttctgttgcaatccaattattcatattttttctcagcgattaacatgtaattatcagcggttttcgctgttattttcttatttaactatctcattatcactttcaagaatatcatccaatggagtgcggatgctgctcttgaaagtgtcggctatatgcacgtacatttccgtcgttttcagttggttgtgccccaacagctctttcacgattttcaagtccgtgccctgttcgatcagatgcgtggcgaacgagtgccgcaacaggtgggggtacacccgcttggtgattccggcttccttcgctgcctctttcagcttcttcgacacgatgctctccgtgaacggctcgcccttgtaccgctcgaacagccattcctgcggcttgtacaacttggtgtactcggtcagcttcctgacaaggggcttcgacagcagcgtgtagcggtctttcctccctttgccctgccgtacccgtatcagcgaacggctcacgttgatgtcgtggggcttcaagtccagcagctcgctgattctcaacccggcggagtagagcagcgagaacatgcagaacagccggatgtccggaccggttgcgtcaaggatggattttatctcctccttgctcagtacgtcgggcagcgtccgttcccgtttggctcgctttacctcgtaacattttcgttcctgtcccagcaccttctcgaaataaaacttgatcgagttgatgcgcaggttctgttggcacgacgagatcccccgtgtgtcaatcaggtgtacgatgtaggcgttgatttcttccggtcggatgtagcggaggtttcttcccgcaaagtattgctggaactccttgaaataggcagtgtacgcacggacggtatgctcgctgtaccgaagttgccgcagcgtctcggcatagccgggcgggatggcggggctggttttcccgtttttcttgggcaaggtgtttttcagggcggagtagtcaatatacgccgtttccacatggcggtcgaaaaagccggacaggtcgaagccttcttccggcaggtaggctctgtcgccctcgaaccgcacacccttctctttcgacagcgacagccggatggcatcgtcctcgtcgaactccacttccacgtatttctgcccgtcacggatggcaggtgaaagcgttattctcggtttgctctgatagactttcatacgcatcgcatgggtggcaatgacagaccgtgtccctcattacccatattttacaaatatagagaaaacaacgaattatcgccgtttcccggaggagaaaaatgcgtgcggggcatgattttttggtatttttcacaggaaagggctgcgacaaacctgcgaaccggacgacaagtgcggacagcccgcaccggacttgcacgttccccgtgtttctccctctatatttacgcccggtttcgtttgagaaccaatagtattcaccatttaaaaacattagattatggacgaacgaccggacagcagccagcagttaatggacatcctgctcgtcatggacgagaaaggcacgctccaagccgtcagcggagtaaaggacggcgagttacagaccaagaaccccttggaggacaacaacgacctcctgcgggtggatcgccacggcgatatgttttcgaatttcttttccaacctctggaaccagttgaaagacccgacccgcttccacttcttccgtgtgccggaagaggaggtgcagcgggtagccgccgatttccggcagcgggagagccagtccgtcaagacgggcgagccgctcgttgcgcagtacgaggtgcagcctcccgtgcaggcgcagcagcagacccaagccgggcagcagcaacagccggagggtgcgccgcagcagtccgccgggcagaccgaacagaacccgcagtacaagtaccgcccggaggacatcgactggaacagcctcgccgcacttggcgtgcagcgggagcagatcgagggcaacgggatgctcgaccagatgctacggggcttccagaccgacaagaccgtccgggtgcatttccacttcgacggcatctcgcacagcaacgacagccagctctcgctcaagcccggcacggacggcaggctgaccgtgtgcagccacggcatcctcgacccggagaagatgcagaagcagttcttcggctacgacatcaccgactccgacaagcaggtgctccggcagacgggcaacatgggacacccggctactgtcaccaaccgggcgggcgagcaggtcgaagcccttgtcagccgcaacctcaagaccaacgagctggtcgccttcccgctctccaaggtcaatatcccggcggagaagaacgggcataccttcaccccggacgagatagcccggctcaaacagggcgaggcggtggtctgccagttcctttccagagccaaggagggggagcagcccaagctctacccggctcccgtgcagttcagcgcagccaagatgcaactcgaatttctcttcggcgaccggggcaggctggcgatggatgcgtacaaggcgaacctgaaacagaccgccaatcaggaggtgccgaagaccttccgcaagcaggagcttaccgagaagtcccgcctcgaactcgaagccgggggaacggtcaaggtctccggcttggtggacaagaaaggaaaagcctaccaaggttacatcacatggaagcccggcgagaagcccgccttcatgtttcccaaggactacaaggcggcgctcgaagaggggcgtgtcaaacccgccgtggagaacgaggtgcaggtggcggtcaattccgagggcaagaccgtcgaggcgacccgcaacctgaaagaagccctgcaatccgcacagcagcgacccaccggggagcagaaacagcagcaggagcgcaggcaggagcagaaagaggaccggaaacaggcacagaagcaggaacagcccgacaagcccaagcgcagccggggtgtccgccgctgatttcccccgccattctgtaaatgaattacccggttatcccgtccgagcggcgggataacttttgtcaaaccgttaaaaattaaagaaatatgattacagcagtcatcgcagaaaagccttccgtagcgaaggatatagcaaacgtgttgaatgtccgggagcggcacgatggctacctctcaggtaacggctacctcgttacctgagaggtagccatctcgtccagctcgccatgcccgaagcatacggctacacgggcttccggcgtgagaacctgcccattctgccgcaggagttcaagtacatcccccgccagatatgggagggcaaggagtacaagcccgatcccggcgtgctcaaacagttgaaggttatcaaggaggttttcgaccgttccgaccgtatcgtcgtggcgaccgacgccgggcgtgagggcgaagccattcatcggtacatctacaattaccttggctgccgcaaaccctgcctgcgcctctggatctcctcgctgaccgaccgtgccatccgggaagggctggacaacctcagacccggcagcgactacgacaacctctaccgtgccgccgaagcccgtgccatcgccgactgggagattgggctgaacgccacccaagctctcagcatcgccgccgggcagggcatctactcccttggacgggtacagacgcccaccttgatgatgatttgctcccgttatctggagaacagggatttcaccccgcagacctatttccggctgaaggtcacggcggaaaaggacggcacgcctttcgccgccatctctgaattgcgttacgaaacccttccggcggcaaacgccgccctcgccgctgtaaccgcaacggggacggtgcaggtttccgacgtgcagcgcaaggaggtgagccaagaacctcccttgctctatgacctgaccgccttgcagaaagaggcgaacggcaggtacggcttctcggcggacaagaccctctccgtcgcccagtcgctttacgagaagaaggtgttgagctatccccgtaccggctcccgctacctctcggaggatgtgttcgacgagatacccgaccgcatcgccctgctggagcggtacccggctttcgccgcccatgccgccgccctgaaaggagcttcgctcaaccaccgcagcgtggatgcgggaaaagttaccgaccaccatgcgctcatcatcaccgagtgtctgcccggcaagctgtccgccgacgagcgcacggtgtacgacatggtagccgcccgcctgctcgaagccttctccgcccgttgcctcaaggacgttaccaccgtctccctcacggcggggaacagcgtgttcaccgccaaggggacggtcgtcaggtccgccggatggcgtgccgtgcggaacgagcgggacgaggacgacgagggaacagccgctttgccgcccttgcagcccggcgaggctttcctcctgcaatcggcggagtgcgtggagaaacagaccaagccccgtcccctgcacaccgagagcagcctcctttcggcgatggagcattgcggcagggagttgcgggacgacgagctgcgggacagcctgaaagggaacggtatcggcacgcccgccacccgtgcctccatcatcgagaccctctttgcccgtgactacgtgcgccgggagaagaagagcctcgtgccgaccgacaaggggcttgccgtgtaccagatagtgaaggacaagcgcatcgccgatgtcgagatgaccgggcagtgggagaccgccctcgccaagatcgagagcggggagatgaatcccgacaccttccgcaagggcatcgaggtctatgccgcccagattaccgaagaactcctgcaagtgcaggtgtccgtagcggacggcggacatatcccgtgccccaagtgccgttccggtcgcatcctcctttacccgaaggtcgccaagtgcagcaacgtcgattgttccctgaccgtcttccgcaacaagggggagaagcagctcaccgacagccagattgccgacctcgtgaccaaaggcaaaacatccctgatcaaaggattcaggagcagggaaggcaagcccttcgatgcgtacctcaccttcgacaaggacttccgcaccgtgtacgggttcccgccccgcacggacaagcccaaaggaaaggagcgcaggcgatgaacggcatcggttggatcaccgtggcggaagccgcccggctctgcggcacggacgagctgcgcatcaccctctggatgaacggcaaccacatcgcctacgcccgtttcgacggcatcctgatgatcgacggcgcatcccttgccgccctgttcagccgcaaccgggtcgccaccatctacgaggacgtggcgcaacagcggggcaagcccggcagaccgggcaggctccgccgcctgctcgacaccccgctcgacaccttcggcttgtcgcagcgcatcgtccgggcgtgccgggagctgggcgtcttcaccgtggagcacctgctcgtccacctccgccgcttccgcttctcccgcctgtactgtgtccgcaacttcggcagcggatcggcagccgagaccctccggcggctccggcaggacggcttgacagacggcggcagcccacgggatttcaaggtcttgtacccgtaatcccggcaatacaggtaaataagtgcggcaatgtcgcacttatcacaaaattatttccggatatattttgtagtttaagagataagttctatatttgcaaccaatagaacctgccaagcctcttaacaatgctcaaataggcgggtcgtttttttatatacacctatgaaacaactgtttaccaaaacattctactccccacaacagcatattgtccttttaaagaatagaggtttgttaatagcggacgaggaaaaagccgccgggtatatttacaatatcggttatttccgtctaagtgcttacttctatccgttgttgaagttcccaaaggaacaacatctgtacaagccgggggcaactttcgtgcaggcgttgaacatgtatcgtttcgaccgcaaactaaggttgttgctctttaacgagatagagaagatagaagtggctatccgcagttgcataaccaatgcggtcagcgaatattttaacgatttgttttggattaccaaccctgcatattttttcaatatgcagagcttccgatacacacaggacacgatagatgcggaattgaaaaaatcaaaggaagactttatactccatttccgttccgcttatacggacgattatccgcctgcatggatgattgctgaaattctgccattaggattgctttgcaggatttacacgaacctgaaagataatgtgataaaaaaacgtgtcgcccaacatttcggtttgcaagtcccggtgttcagttcatggattgtcattctggctggcttgcgcaatatgtgttgccaccattgtcggacatggaacagggaactggcgaccatcaccacggaaccacgcaggacaaaatacggttggattgactcttcccggacagacaagcgcaggatgtattaccgtatctgcatgatacgttatttcctttataccgtatcgcctaataacagtttcaaggacaagctgaaaaccttgttggctgcctatcctaatatagatacggcagcgatgggatttccgtccgattgggaaagcgaggatatttggaaataggcaacaccgttgcctaaatttaatatttctttgccattcaggatattttcgttatctttgcgccagtagaacctgccaagcctcttgataatgctcaaatcggcgggtcgtttttttataacccgtcatcctttcctgaatgacccaagccacttttcagtggctttttgcatttcatgggcatacccttccgtacaccgtccggattttcccgtcctccaataccttgctcgaccgcacgatccacgtcctgccatcattcagcccgcactccagtgccttctcgccgccgccgaccagtaccggcacggttatcaccacgatttcgtccgccaacccgttatccaagagcaaagccccggtttccgctccgtaagccgttaccgtaccttcgccgtccgcttttattccccgcagttccgctgccgcatcccctgtaacaaaccgcacccgttccttctccgtcaggtcaatacagccgtccgtcacgaccaaagtctcttttgccgtgagcggccagcccagatggttcaggtaaatgcgcaggtaggtttcctcgtcgatcagcacgaagccggaggcgtccaccgccgcatcgaaatacttgtccgatctgaccggacaaccgtcaatggattggtacacgtgcaaggtaatctgtttcatatcaatgtgtttttaaggattatgtccgcctcgcacccaaaagaacagcgtgaactcacactattccggtacgaggtactggcatacctaagaaacgaaacaggcaagctcacgccgtataagcatacagcatgaacattgcgctatccatcccgtttcttttgaaaagtgccagttttcgtaccgagacgttcagcgaacgtacaatatgtatatcaatccccgtctgtttccaagccgggtatgaatcttctatgtcacgacagcgactgtgcccgaaagcaccgccttctgtcttcgtggagcaaagatagcgaaacttcccgaataacaaaacaatagccccgcctaatctcacgatccggcagggcttcatccaccaaaagcaccgtcagaaaaatgtcattttcacgggaacagcccccttttcctgcgcctttcctctttccgggcttccttctccttgcgtttcgcagcccgttcctccacttcggcgaagcgggtgcggatgaactcgtgcacgtccttcgtgcggtagaacaccttgccgctgatggtgaagtacggcagcaccccgatggcacggtagcgttgcagcgtgcggatgcccaccttcagcagcaggcacaggtcttggttgtccagcacctcctcgccgtcgagcgtgttgttcttcttcagcaccctttccagcaatttctccgtccggtcgaagcgttccatgatgcgctccatccagccctcaaactcttccctgtccgtgtacatagcagtcgccctccttttcgatgatttccttttcccgcatatagcggatgtagcctttcgccgtccgttccttcacttccagcatctcctgtatcagctcgcacagttcgatgtagccgtacttctcctgccgggcgaacgcctcccgtgccatctccgccagctccttctccttgcgcttctctttctccgccctcggcttctcgcccacatagacgggcatcccggcttgcttgtcccatctgaactgcatcagcggaatatccagcgggctgccgtccctgaccttcaacgccttcaccaccgacacctccgggttctcgtccttctcgatggagaggatggcggcggacttgcgttgcagctcgctgccgaggtgtccccgcagtttcagtccgttcggcacgaaatgcaccacggcggcgatgcacgtgcggtagattcccgccagccggtagatctcgtcaatcagcgccacgctctccgcctcgtcgttggcgcagcggatcaggtccgccaccccgtcgatgacgaccagatggatgcccccgtgcaggtagtggtaccggtccatgctctgcacgatggcggtcagccgctcgcttctcgacatccccgtcaggcaatacacgtgcaggtactccggcatccgctcacgcccggcacggcgcagcagccgccccgtgttcttgtggagctgttgctcgctctgttccgtgtcgtatagcagcaccgcacgccccttgcggttcggctccacccgcacccccaagagatcggcgtccgtctcccgttccatgatcgccccggcgaccagtgcggcggtgtagttgctcttgcccgtcccttcgccgcccgtgatgcagaggatgttctcttccgagcctaacggcacgtccccggcggtaacgatggcgaccgcctgttcgggcgggtggtcatagtcgatctcgcacgatttcagcatcgccagcgtgtccccgtacagcgtgtcgagcagtttcaggaacagccccatcagctcctccctcgtgtgcccggctttgaagtagtccgtcacgtccttctccgccttcgtccccggcagcggcagcaccagccgtttcaccccgtactccgccagttgcgcacggtgcttctccgagcattccagccccgtcttgtccgtgtcgtacagcagcacgatgtgcttgaagcgatagaccagcttgcgcacggtcttcgcagggatgaccgaggtctccgagttgaagcagatggcgtggaagccgtgcgccgccagcgtcagcacgtccttctcgccgcccgtgaggaagagcaggtcgcccttcgagggcagttgctccagcccgaagcagtagttgtcgcccgtgtgcccgccatagacgaagcgcacctccgacatcgggcgatagaccttcacgccccatttccccctgtacccgaacatcggttccgccggggtggagctgaaaccgaacgccttgccctccctcgtctcgccccggtactcggcgagcgataccgtcccgtagcggcgcagcacctccacggtgatgcccgatgcgccccagtaggcaagctccccctcggtgaagggcttctccgccgcccggtagggcttcggttcgggacggtcggcggacactgccgcctcttccgtgtccgttccggcttctccagcaccgccgccccttgcgcccggcacgagccgcaatctccggcagcccccggttcccaccgtcccgtcggtcgggctgtccccgtccagtccgaggcacagctcccggtcgatggtgtgcagcacctccacgaagtcggcggcgttccggcagtccagccctttcagcttcgccacgaggaagaaacagtctcccgaatagtccccgttgccgaagtccttcatccggtacgtaccgctccggcggtcgtaatacacgttgcacgaagccttgctgtcggcgtacagcgggttcaggaagttcctgcccacccgccacttcacgggcaggtagtggcggaacacgtccagcccgttactggttcttgccagcacttcttcctttcttaccatagcttccgttttttcggttatgcaggggatgttccgctatcatccggtcgatcttggcggcgggcgtctccaccatccaccgctcacgcaggctttcgacagcctgccggggatagcgtatctgccgcccgatcatcgaataggggacgatgttcttctggcggtagcgttgcagggtgcggtggctgatgtccagcgcctcgcacacctccttgtgcgtcatccacttcgggtcggctttccgtcccttggtcgcagggctttccgcttcctctttccgtttgcgctccgtttcctcccggttccgggattcctccacgtaggcggttatcttctcgatcttctccacgagcaggcggtaggcgttgctctcgatggtcattatttccattgtcgtactcatttttaggtttctgccgcaaatgtcgcccgattcgccggtttttcctgccactatatcagcaccttggcaaagatttttttcggggcgcattttcgcccttgccgccgttccgggcggtaaaaaggaccgaaacggggtaaaaaagagcgtccggaaggctctttccagcccttcggacgctcccttcccgtgtcctgccgccccgttgccaacttgctaccggctatccatgtcccgcatcttcttcaacagcctctccttcatctcgtccaagaacgccgtcgggttctgttgcccccgcagcctgccgaaagcgtggtacacgttgcccagatccacgtggaaatgcttctcgaacagcgcagccagctcgccgatctcggcgttgccctcgtccacgcttcccgtcacgtgtatgccatagacgagcagtatggcggcaaccttcgtgttcgtccagcggtgttccttctccgtcacggcttccgtctccgtcccctgcgccgcacgctccatccggcggctcaggtgtaccagcagcatctccaccgagatcagccgtgccgccagtatgtcgtagcccgtggagaactccgcctcctcgtccagcacgaagctgccgctttcggggcttagctcgcccttcgcccgcaggaaatagtagctgtcccggtacgtcgccccgctgtggtaatactggtaaaagggcaggtagcgttccatcatccgctcggcacgctccatcgctttgcggtagtacggttcggcgacacgcaggcaggcggggcagccgctctctatctggtacacccggtaatagtacagcagcctgcccgtcagggcgggcttgtaatacttgaagtagaggatctccttcgcgtccccggcgaacggatgggcgagggcgtactccttcagttcccggttcttgcctttcaggtacgagaccatctcacggcagacgcctatcacctccttgccgtccatgccgggggctgtggtcgccatgcgctgatccacctccttcagcagcccgttaaaatattcttccatataaatcttgtttcatgttgtttataagggcgcaaagttagcggatggcagggaaacggacgttctgaatcctcaccgccggattcggattgtccgccaatcggctccggacggtcggtttttcacggcagggctggataaagggaggctaaactgtacgggcgcaccgggcgatttcacggatttcggcaggagtagccttcaggtgcttcttgcagaagtcccacaggtagctcggagtggcgaagccgcacacgtcggcaatctcttgaaggggcatgtccgtgtccgccagcagggaggtcacgtgcgccttccgctgttccgtcagccagcggtgcggagtggtgttcagctcctccttgaaacgccgtcccagcgtattgaccgacatggcgcattcccgtgccagttcctccacgttcttcaccttgggcagagccagtacgatttcttcccggaacgagcagccccgcaggtgcggcaggtacttttccacctcctgcaagtccgccttgccgaacatcggcggtatgcccttgcggtactcggacgcccgttcacggcggaagcggaacagcagtcccgccagacggttgcagagcacgttcaggtgcgggtattcgtcgtaggcgttgatgcttgcctgcatccggcagaggaacaggaatcctccgcagtccctttcccggaaatacgcctccgccgtttccagcaggaagtctgacgagcttccgtggcggtgataggcgaccagtatcagcagcccggcttcctccttcacccggtacgaaagtacggggcggtgttcccgcagcagctccaccagccgtaccatccgtccgttctcccgtgcgagccgttccgccgcaatccatgtcaccggacgctccgcatccgtttgcggcaataccttgcgtaccttttccatccactcccgccatccctcccggacggcttcattcattagaattagtgtaagattctgtttcattttgtttcaatacgatattaaataatacaaatcttacacgaaattacaaattgtttgcaatagatgtcctgccgacaccccgtatcggtcacgatatttccttgaattacagattcggattttgctccatatgtccggatattcaatcgtgaaaaacagaaaggctgtaccggttccacccgcagaacggcatgacagtaagcagggggagccggaagaaggtcattcgccggttggtgagtgcgtcttttcaacgggatatttgccgtcccgtatctcctgcaacctttcgatcagtggttgctccttggaatggttcttttgttcggctatgatgaagaacgatgcaaaactgccgataacatacagccagaacaggcattgcccgagcagtttccggtattcgcccattgtctcgtacttcgcctgcatcgctttcagcttcgcaggacggtaatacagctttccgcttgcttatcccgttacgaagaacagcaacagggcgcatcccgttgcggcggcaacgatcagccccagccagaaacggtaactcctttcccccagcgtacccagccagaaattcccttcccaacttcccggacgggagtatgtccaccgccatccgcagacaatccccacgagccacagcagcaggattcccgccacgatcaggtagccgtacctcggatgcgcctgcaaccactccggcagaccctccataaactcgcttattttatcgaaccattccatagcaataacagaaaaagccaaattcataccttacggacgaaccgttatacctcaaagcaaaaatagcgaaaagtccaatcactcaaaaagtttcaccgcaaaattcttttccgtttggaagaaatacgttttatttgcacctgtatagccgcaaacgtatgaagaaagcctccccacataaaagaaccagccggttgaagctccccggattcttcgaccacctcttttattggacgtggcgcagttgtcggcacggcttcccggctcgtagttttgcggtcatcagtgtggttcagttcgcctgcctcctgtttcctgtcgccatcgctttacagttcttggacactccggctgtccgctttctttacgaaacagacaaccgccttacgcttttcccgctgatactgccgttccccgtattgctctggaggaatatgcgcatctataccgaggagcgttaccgcatgatgcacgactattacggggcgttccatgtatcggtacggcaacgctatcgccttcgtttccttgtctgcatggtgcttgtagttctcgccatcctgcttgaaatacggctgttcaccctttatcatgaccgctgcacggccatatcctcaggcaacagccatcccgcaagcctctatgtcccgtatcggtatgacaacggcaacgatcccgtgcaggaaggcgtctatcgcatcgtcgatgaaaaagggcgtatcggatatgcggacgagcatggcaataccctcgtagaaccacgcttcgcttttggctttcctttcgagaacgggaaggcgaaagtaaccgacacgggagaactggaagaagttcccggttcggatggggaataccactattgggaaagcgatgattggtattacatcgaccggaaaggacaaaggattgaataaaagccccaagactgccctaagcccgacattccagccaccctacctgccaatcccttgcagggtaaacacgaagccgccaagccctatcggaacatcccgttcatcccacctttcccccgagacaaacattaaatctcaaaaccagctcatttacagaaacttaaaagaatatcggtgcaagccgcaaaacagccctgtgtggctggtgcaaggtgcagctatatttatatatatagctgcaccttgcaccacagaaatacacactgaaaatcaacaccttacacttttggtaaaaccacgggtgcaacctcgttttttgcaccgcctcctgattttatgcttttcctgtaatccggtaatcccgaaaaataaaaaatccccgaaacatttccctttttcggtcaaaatccctatatttgcatcagttccaagagcagagcgaagcaatgcagcgaaacccgcacagctaccaaatcgctaccggctaccgaactttctactctttaagtcttatctaccaaccgattacaaaaaaacgattgttttttgctgaaaactttgccaagcgttggatatcgccttcaaggagccactgataatcttcagaaccgtcacaacgaactatgcgaatgaatgcccctattacattagaagacttacgaggtatagcggctgaataagttatcttcttcacaccattatcgagactgatagagaatatatctccttcgtaaacaataaccgggttatctgcatatcgtatttgtccagcacgcatacgcatagtcagttctccatagccagtaacagagacactagctcttttttcatatctatcaaatcctcgttcatctttttgacccgtttttacctttcgtggaatgagataacaatgaggatgtgatgtattatcaagtgatagcccatttacagccatatcgaggaagcaaccaaacagtgacatcttactacattcagccaccgaaggattctcacgaagaaccttctggaaattaaatacttccttgtggtaaatctgttcccccatttgagaaccccaaatagcattgtacatctgaataaatttcgtctgtacattttcattttcgacaattttcgttgctggaagtgcgttaagctcctccactttaatttcaataatgttactcataattgttttaatattagttttttattagtctccttggtatactccacggctgtattcttccattaagagtatgtcttcagttgtaggttcttttctgatatctgtttttgatgaactacatttgatgggagaaggactgtaatttttaatagcactttctctttcatccaactgctttcctatcttatcctgtaattcctttaataataaagatccttgtttaacttgtgtcatacagctatctgcattaattgtttgatgatattgtccggaactttattatgcaaatccatcattgcgctagctgtttccagctctgaccgcttcacataatattttcctctttccttattatttgccggataaaacttaatccatgctttttcgcgccattctgttataaggcgttttccatatatatcttccgcttgtgatatagttactacttcgggaagtagccctaacatcgtcaacgtttgaacagttccgatcttaatacatcgtgcgaccatcatttcgaagcaattttccataatctctaattaggctgtttctttgtttaacttttgaatggtgttgagcttttgattactgaaacacatctgcatctctatgctatgctgcctgattaatattgattagagttcatatacttcttcaatcctatttcttcgtattcttgcccgccgactccggttaaggtcgttgttgtagtcaaatgcaatctgaaaggcaataattccaagaaatgagagagcaattagcgatttttgtaattgcttgaagtcaatatttagagcaaacactctatttatccaccaagcaccaagttcgttcagtttgctggttcctgtctttttataagccttgtcgagcaggacatttaccgtaccataggcagtacctaatctgtcggcaatctctttctttgctaggccacaggcagccaatcctgctatttgattttccctcttggttaaggtagaatcagcttgcagatccatgatgcaaaatctctaattcggctgccgctctggaaactccttttgtagcttcgagggcttcattagccattcttacagcgacattcagtacttttgctttgtaagttgaacgagcagaagcaggcttgttgttgaggatattgtgcaccgtaccctgtgagcatcctacttccttcgcaatctgcttttcgtatccgtaaggcagattagctttgatagtttctaattgattttccatatacattattatattatagtaattagttccctggaaggcgaccaagcctgccaaggacaacgtatcgctgttgcgcggatgattaaagattcattctatctcgtaacctctttcagattctccgttaccggaaggcgcattctcaaagggtttacatcgaaaactaaacctgcatgctttattattttagtctttgacttcttcgcaagtttctccgagccaagcgacacattctgttgtacccctagtaaagtctaccgccttatttagaggattgaatttaccttcaactatatctccttcttttactcctgcttccttttttagctcccataaaagccattcgttaccagttgaaccggttacatttttgattctcactttcatgacttaatcctccatttcttcattatcgttatcttctacttgcaaggcttcaagcatttcgttatcaagtttagaaaggtcgagtcttacttcttcaccggagtggtagcttgaaactactagaatacaggaatatccgttctcattacattcgaaatcgaaacgtttacttcctccaaggatccgcattacttcatttagattcttcattacgatcttgttttttagggttaaaaatcagctttaagttttagcatccggagaacctccttgagttcgctattggtatagttcctggcaacctcaatacttacacaattatagttagcagcgatttggatagctctctctttgcttacggtgtagattttacgtttcatagcttattcctccgtttttttatcactaaatgaatattcatcttccgaaataccgcaaactgtaaagagttcacgaatttcatctttcagttcttcgtcaccgtcgcactcgtatctatcgttcatgtcataagttgggagttcccagatgttagtgccggtttgggtcagctctgtctgtagcagactgtcattaatggcaacctgtgctttacttgcttcttgtagtgaaacttctaaaattgtcttcattttcttatttgatttagagtaaataatctattttgttaactttgctgcccttttattttggcgttatcaatgttttgcgttaactttatagtgcaaatgtaatcaaaaacattacattgtaatctaaaacaagacaaattgtgtaatcaattaagataatttaataataatcgtatgcatataggtaacaaaatcaaagaagaagtctctaaaagaaatataagtgtaacagactttgccaagttgataaacaaaagcagaccatatacttattcaatatttgaaaaagagaatattgatacagaactacttatacaaatttcatctgttctaaatatttcacctacagctttttttgaagatattacaactggtgtaatgcaaaatggaacaaaaaacattctggttggaagagataataatggtaatatatcaactaatgaatgtcaagatagacttgaggatgctatgatagaaataaagcatttaaaagctgttatcgaaggcaaggataagcttctcgaggaaaaagaacgattaattaatgtactaatgaataagtaaatttatggaagcattgggatttataggagtcgtgtatctattggctggaattatccagttggttattcttattattttgattgtaaagttcctccagcttgccgctgatgttaagcaactaaaaaactcatatatggaaaggagcaaagaattatcttcaagtataaatactctttcctccataataaaggacttaaatacaccaaaaggtgatgattcgaaaaaaggaatcaaagaaggtattagaatagaagaaaaaaaggaagaatcttgcaatatgaaaaatggaattcatgctaaagaaaaaccaattatagacgaaaatagcgatgatttcaaacaacatttacgtaaatggaaaattcttaaagggaaaggatatacagaccaagccatcaaagaatacatggagtatactaagcgtgatatgaattctgctgtagacttcattaactctatataaactggataaagaagcctattttattgattatacaactaagaaaaatagatttatggaacaagatatacgttggttacaaagatatgatagttattgtaaggcatgcaaaagagtattactggttacggaatccgaaagaaaaccccatgagttaaccgaactggaaatggaaggtcttgtacaaagatttgaatatactttcgagttggcgtggaaagttttgcaggatttcttagagtataaaggatataaggatataacaggtccaaatcctgtattacagaaatcatttgaagatggtttaatatcagatcatgatgcttggcgtagaatgtcgaaggctagaaatataacatcgcatacatacaatgatggcaaagcaagtgagatagtcgaaaagatttacactgagtattctatactactaaaacagttagctgttcggcttggttatgaaagaagtgaaatcactggattattcgcataatatgtttggtttaagcaatgaagttataaaagatattagtgatgtattaaaaaaacatcccaatattgacaaggtattaatatttggttccagagctaaaggcaactataccgaaggatcagatattgatttggcccttataggggaaaatatatctttcaatgaactgttggatataaatattcaaatagaggacttgggattactatacaaagtagatatagttgattacagtaagaatataggtactccttttggcgagcatatagatcgtgtcggactgctattctatgaaaagcaatgaccatataacatcgtgaagtccagttaattgaaaaagtagaatacactaaaaggcatcctattggataccttttacaatataattacatatattttcaatatacctaatggcaaccttatctagtccaccgtcatctcgttcatagcaaaatgcattaatggaattagatgattgtttcattgtataatcaatataatatttgcgtagtttacgcatacgataattgtaaagtaactttttaaacataacttttaatttaaaatataaatggaaccagagaataccccaaaggtaatagaactcaaggagtttgtagaggaagcaatttcccaaatcgttgatggtataacagctgctcaaaaaagagttgaaaccagtggggctattgtaagtcctcggaaaagtaacagtaagaacaatgtagaaatagaaggaaaattatacagtgttcagaatattgaattcgaggtatcattggctaatatgtccggtgaaggtggaaaagttggctttggtgttactttcggtgcttggggattcggtagtaataccaaaattgaaggacaagctaagtcagctacaaatataagatttagtatacctattgtttttccttgtatagataataaagaaaacaagaaagtgcaagtagccggacgacaaaaaataaccggataaaccaacaaataaatatatggaagataaagacaaaacaatcgttgctctccggcaacagctccggaaagtactgcaagaaaacagtgctcaaaaacaagaaattgccctcttgaattatgagttagaaagggctaaaataagaccctcaaaatagcgttctttgaactatctttgaaatggttagctcacatcattataattgactgatatgtaactgaatatcctttataatcacgctgctttgggagcagggggtcgtgggttcgaatcccgctaccccgacgaagaaaatcaagtcaagattcacaaaataaagccagtacaattagtattggcttttttattatatataggataagtgtaattatccccgtttgggggcaaataaaaagggcaattctttgaactatctttgaacaggtttctagcattatcctcattttcttatttaatttagagtaaaaatctattttgttaactttactacccttttattttggcgttatcaatgttttgcgttaactttatagcggaaatacaaacattgtttatagagaaaacgataacaaacaaaatacttaaacacatgaagaaaactctgctgatgctcgttgttattttcatttcactatattcgcattcacaaagtccctttctgaattttagaattccagaagaatcaaataagcgtatcattggatattcttcaagtaataaaataaatgtttttttgaatataaaatatcaatcttgtaatactctaatacagtattacaaacaggattctaataaattgattgtgtaacaaaaataacgatatgatgaaaaagtttttttatttgagtgcgatactagccatagttttggtttcatgtaattcagaaaaggagtatatagcaaaactctctaataccgcttctatgattgagaaagaagctgatttaagtgaagcaatagctcttcattattgtgatacttggagaaaagtaatttacgatcatgaatacaatggagaatattgcactgatttcaatgaagccttagcgaagcatcaagagtttattatcacaacagatacctataagagactaaaacaaaagaaagattcaatcgaggctataatgccacaactaaatgattatccttcaagttgtaaagatgcttataatgagttagtatcaatatatgcagatgcagatgaattattcagattcgcagatgagcctaggggttctttatctacatactcaacaaaaacgacagacctttatcaaaagatagaaaagtcactgaaagaatttaaaataaagcatatacaaaacaaataatttaaaagagtagtatagttattgtagcagcttattgaatttaagactatcaaaagacaaaataataatttcacttcaagagcaacttcagaaaatactgctagcaaatagtgttcaaaagctagaaattactcttttgaattatgagttagaaaggaatagaacgaagatctcaaaatagcgtttttgaactagctttgaaatagtgacggtatatgacagcgataccgtcactatcgcaagcatataccgtcactatctttaccggatagcgtcacccttttacatgttcaaataataatcccgggttagcgtcatatattcctcgctatattgatgacgagccagttctgtcaatagttcttctacaatgcactcttgattggaaaaagaaaaagtaatcaaaacacgtttcggaataccgccgggtttagtgattacattcagttgacggactgcatataatttctttatagaagctatcttttttacccgttcagctacatctgccggaatcaccactgtaaaaaatccgttttctgtcaataatccgcttactccttccaacaaatcttcataggtcaaagaatcattgtgacgcgccgcggctctctgacgatccggacattccagcgaatcgacaaaataaggaggattagaaacaattacgtcgaatttatccgaagacctgtatttcctaaaatcagcctgcaccacctctacccgctccttccagggcgaacgaataatattttccctggcttgcccgacagccgcttcatctatttccaacgctacaatatttgcatccggcaaactgcgttgcaccaacattaaagctaccaaccctgttcccgtcccaatatccaaaatccggtgcgcactttcaacggaagtccaagctcccagaagcaccccatccgtaccgactttcatggcacatttatcatgccataccgtaaattgcttaaattgaaaataaggattcgacattttatccgtttatcttaaagccgttttatactattattttattgcaaatcgccaaaaataaataataattatggaatactccctttacaagccgatattttggcattgtttttgtgtttttattctgcgcagtgctttattattagagagaatcaattaactttgcaaacgatttatgcatatcaatatgacataaactaaattaaaacgaaaaaatgaaagaaagatatttattggaagatggaggcgataacaacttctcgctaatcacagactatgatgggaacgatgaacaagcatttgatgtaaatgtgaaatctggtgaaattcttccggtactccccttacgtaatatggtattgtttcctggagtattcctgccgatcacggtaggccgtaagtcttctctgaaactcgtacgagatgctgacaagaaacataaagatattgcagtagtatgccagagatcggcacatacagaagatccgaaactggaagatttacacaatatcggtaccgtaggacgaattgtgcggatattggaaatgccggatcagacaacaacagtcattcttcagggaatgaaacgtttaagtctgactagcatcatcgaaactcatccgtacctgaaaggtgaaatagaacttttggaggaagatgtccccggcaaagatgataaagagtttcaagccctggtggaaacttgcaaggacttgacaatgagatacatcaaatcatcagatgtgatgcatcaggattcgtcgtttgctattaaaaatatcaacaactcaatgttcctggtcaatttcatctgctcaaacctgccgttcaagaaagatgagaagatggacttgttgagcatcaactcattgcgtgaacgcacttatcacttactggaaattctgaaccgcgaagtgcaactggcagaaatcaaggcatccatccaaatgcgtgcccgcgaagatatcgaccagcagcaacgcgaatacttcctgcaacagcagatcaaaaccatccaggatgaactgggtggcggcggtcaggagcaggaaatagaggaaatgcgccagaaggcagaaagaatgcgctggaatttagaagtcagagacacgttcatgaaagaacttgccaaactggaacgcactcatccgcaatctccggattacagcgtacagctcaactatctgcaaacgatgctcaatctcccatggggtacttatacaactgacaatctgaaccttaaaaacgcagaaaagacgttgaacaaagaccattacggactggagaaagtaaaagagcgtattttggaacacttagccgtattaaagctgaaaggtgatatgaaatcaccgattatctgcttgtatggccctccgggagtgggtaaaacatctcttggaaaatccatcgcatctgcgctcaaacggaaatatgtacgtatgtctttaggcggtgtgcatgacgaagcagagattcgcggtcatcgtaagacttatatcggcgctatgccgggacgaatcatcaagagcttgataaaagccggtgcgtccaatcctgtcttcatcctagatgaaatagacaaagtcagcgccgaccgtcagggagacccctcttccgcattgttagaagtgctcgacccggaacagaacactgctttccatgataactttctggatgtagactacgacctctccaaggtattgtttattgcaacagccaataacctgaatacaatccccggcccgttgctcgaccgtatggaattgattgaggtaagtggatatatcacagaagaaaaagtagagatagcccgtaagcatctggttcccaaagaactggaagccaacggactcaaaaagacagatatcaagcttcccaaagatacgttggaagctatcatcgaatcatatacccgtgagagcggcgttcgtgagctagaaaagaagatcggtaaaatccttcgtaaatcagcccgtcaatatgctacggacggttatttcgccaagacggaaatcaaaccgacagatttgtatgatttccttggagcaccggaatatacacgcgacaagtatcagggaaatgattacgcaggtgtagtcaccggattggcatggacagctgtcggaggcgaaatcttatttgtagaaacgagcttgagccgtggcaagggcggacgtctcacactgacaggtaacctgggagatgtgatgaaagaatctgccatgctggcacttgaatatatcaaggcacacgcttctgttcttagtctggatgaagagatttttgacaactggaatatccatatccacgttcctgaaggggctattccgaaagatggtccgtcagcaggtatcacaatggccacttcactggcttctgccctgactcaaagaaaagtgaaagccaacattgccatgacaggagaaatcactcttcgcggcaaagtgcttcctgtgggtggcatcaaagagaaaatattggcagccaaacgtgccggaatcaaggaaatcatcatgagtgccgagaacaaaaagaacatagatgaaattcaggatatttatttgaaaggactgactttccactatgtaaacgatataagagaggtattcgctattgcattgactaacgagaaagtagcgaatcctattgatttatctgttaagaaacccagccaggaatgacatttgagttacaatatacagacactaaaagtaatgcccgtgccggtctgataacaacagaccacgggcagatacaaacacctatcttcatgccggtgggcacactgggcactgtgaagggagtacatctgaccgaattgaaagaagatattcaggcacagattattctgggtaatacctatcacctctatttgcgtccgggactggacgtgatcgagaaagcaggcgggctgcaccgtttcaacggtttcgaccgccccatgctgactgacagcggtggttttcaggtattttcattagccggaatcagaaagctgcgtgaagaaggagccgaatttcgttcgcatatcgacggaagcaagcacatcttcactccggagaaggtgatggacatagaacgtaccatcggtgcggatattatgatggcttttgacgaatgtcctccgggcgactcggattacgagtatgccaaaaagtcattaggattaacccacagatggctcgaccgttgtatacaacgttttaacgagacagaacctaaatacggttataatcagtctctcttccccatcgtgcagggatgtgtttatcccgacctgcgcaagcaatctgcagagtttgtagcgtccaaaggtgctgacgggaatgccatcggtggtttggcggtaggcgaaccggtagacaagatgtacgaaatgatcgagattgtcaatgaaatactccccaaagacaaaccccgttaccttatgggtgtcggaactcctgtcaacattcttgaaggaatagaacgcggcgtggatatgttcgactgcgttatgcctacaagaaacggacgaaatggcatgttgttcaccaaagatggcattatcaatatgcggaacaagaaatgggaaacggacttctctcctatcgaagccgacggagcctcttgcgtggatacattatacagcaaggcttatttgcgccatcttttccatgcgcaagagctactggctatgcaaattgcctccatacataatctggcattctatctgtggctggcaggggaagcaagaaagcacattatcgctggagatttctcgacttggaagccgatgatggtcaaaagagtatcaactagattataagaaatgaaaagcaatcgatttataaaacggctggactggtatatcatcaagaagttcttggggacatacgtatttgctattgcactaatcatttctattgcagtggtatttgacttcaacgaaaagatggacaaactaatggagcatgaagctccatgggataaaattatctttgaatactacatgaactttatcccctatttctccaatctgttcagtccgttgttcgtattcattgctgttattttctttacctccaaactggcagaaaactccgaaattattgcgatgttctccaccggtatgagctttaagaggatgatgcgcccttacatgatttctgccgctatcatcgccctcgtcactttcacactaagttcgtatgtgattccgaaaggaagtgttacgcgtctgaattttgaagaccggtatatcaaaccaaagaaacaaaactcggtaagcaatgtgcagctggaagtggatagcggagtgattgcatatatcgacaactataacaacgcaatgaaaaccggtaaccgcttttcattggacaaatttgtggataaaaagctggtttcacatttaactgcacgacggattacgtacgacaccaccaccgttcataaatggacgatccacgattatatggtacgcgaactggatggtttaaaggaaaaaatcactaaaggagaccggatagactctatcatcaacatggaaccttctgactttcttatcatgaaaaatcagcaggaaatgctgaccagtcccgaattaagcgattatatcgccaaacagaaacgaagaggatttgccaacatcaaggagtttgagattgaatatcacaaacgaatcgctatgtcattcgcctctttcatccttaccatcatcggtgtatcgctttcgtcccgaaaaacgaaaggcggtatggggcttcatctgggtatcggattaggattaagtttctcttatatcctgttccagacgattacttccacctttgccgtgaacggaaatgtgccgcctgccgttgcagtctggattcctaatatcctttatgcaggtatcgcattcttcttgtaccagaaggcacctaaataaaaggtaggcaagccttccgcagtcttcacggattctatccatagattgccccaaggttttggatgcaccggataaacgaagagtataaaagtagaagttccgcctattcttgctaatgcaagtgtaggcggaacttttttgttgtatccatttcctcttttgtctattctccattattttcacctgacggtgatttggaaaatccctcttcctccttatattcttaaaatcgttaaccgacttcttttacataagcagaaagatctgcagcagagatgtttttggctataattacaccatttccatccaataaatagttagtgaatccccggtttaaacggtacttcttaaataagccggaatcctcgccttctgtttccacgaaacaagtgggcgtaactatttgatccttacgaacggtttccttaaatattgactgatattcgtcaaatgaaatagaaaccatttccacattatgagaagaacgaagcgcattgctcaaacttacattttgcatccgggactgcgcgtcataacttgcccaaaaacttagcaacacgtatttacctttcaaatttcccaatttaaaggcgggttgcccgtttgacgtagattcgattttaaaatcaggggctacgtcaccctcactcaaacctccggtaggtttgtctttctcaacgaaagcggtcaaggaacaaatcagtaatacaacaaaaatccattttacatgcttcatgtaattcggttttagttaatactatccgggactgtccttaaacagtggtttcttcccgaaacgttgtcttttcaggcatcaggcgaagaggaatccgctgattatcagagcctttatttttgaaaccgggtgcaaaggtaagcaaatattaaattaacttccaagcaaataagcaaaaatctcacttttggggtataactttttatgttatttagcataaaaacgaacttttttctctacttttgcagcgttaaagtctattttttatgcaaccatcaaatactgaattgattctgattcgagttaccggcgaagatcgcccgggactgactgcttccgtgaccgaaatccttgccaaatatgatgccacgattcttgatatcggccaggcagatattcataatacattatcgctgggtatcctgttcaagagtgaagaaagacattccggattcattatgaaggaactgttgttcaaggcttcttccttgggagtgaccatccggtttgaacctatcaccaccgagcaatatgaaaactgggtaggtatgcaagggaaaaaccgttatatcctgacggttctgggacgcaagctttccgcccgacagatttctgccgctacaagcatattagccgagcagggcatgaatattgatgctatcaaacgtctgacaggtcgtatcccgttggatgaatgtcaggcagatgcacgcaccagggcttgcatcgaattttcagtgagaggtactccgaaagatcgcattgcgatgcaggagaagctgatgaaattggccagcgaactggaaatggacttttctttccaacaggataatatgtaccgtcgtatgcgccgtctgatctgttttgatatggactctacattaatcgaaacagaggtgattgacgaactggctatccgtgccggtgtaggcgacgaagtaaaggccatcacagaaagcgccatgcgtggagaaatagactttacagagagctttacccgccgtgtagcactattgaaagggctggacgaatcggtaatgcaggaaatagccgagagcttgcctatcacggagggcgtagaacggctgatgtatgtattgaagaagtacggttacaaaatcgccatcctttcgggaggattcacttatttcggtcaatacctgcaaaagaaatacggtatagattacgtctatgccaacgaactggaaattattgacggcaaactgaccggacgttacctgggagatgtagtagacggaaaacggaaagccgaactgctccgcctcattgcacaagtggaaaaggtggatattgcacagaccatcgccgtaggagacggagctaacgacctccctatgctaggggttgccggactgggaattgctttccacgcaaagcctaaagtggtggcaaatgccaagcaatcgatcaacactatcggactggatggagtgctctattttctcggattcaaagattcttacttgaatatgtaattagaccaaaaaatagattatctttgctgacaaattaaataaaagaatgaagttttccgaactacaattaaatgcaaatgtgcttgaggcgcttgatgccatgcgatttgacgaatgtacgcctatacaggagcaggcaattccaatcatacttgagggtaaagatttgatcgcagtagcacagacaggaacaggtaaaacggccgcgtttctactgcctgtattgaataaattatctgaaggtaaacatccggaagatgcgattaattgtgtcatcatgtctcctacccgggaattggcccaacagatcgaccagcaaatggaagggttttcctatttcatgccggtatcgagtgttgccgtatacggtggaaatgatggaatattgttcgaacaacagaaaaaaggactcactttaggagctgatgttgttattgctactcccggacgtctgatcgcccatttaagccttggatatgtagatctttccaaggtttcttattttattctggatgaagcggaccggatgctcgacatgggattctatgaagatatcatgcaaattgcgaaatatctgccgaaggaacgacagacaatcatgttttctgcaacaatgcctgcaaagattcagcaattggcaaacacaatcttaaataatccgtcagagataaagctcgcagtttccaaacctgcagaaaagattattcaggcagcatacgtttgctacgaaaatcaaaagctgggaatcatacgcagtctttttatggatgaagttccggaacgtgtgattgtctttgcatcttctaaaatcaaggtcaaggaagtagccaaggctttgaaatccatgaaactgaacgtaggggaaatgcattcggatctggaacaggctcaacgggaaactgttatgcatgagtttaaagccggacgaatcaatatattggtagctacggacatcgttgcacgtggtatagatatcgatgatatccgcctggttatcaacttcgacgtgcctcacgacagcgaagactatgtacaccgtatcggacgtacagcacgtgccaacaatgatggtgtagcacttacgttcatcagcgagaaagaacaaagtaacttcaaaagtattgagaacttcctggaaaaagagatttataaaattcctattcctgaagaattgggagaagctccggaatacaaaccgcgtccttttagcaagggcaagggtggcaactacaaaagaaaagatttccggggaaaaaggaataataataacggaggaaagagaaataaccgtccgtctccccccagacaaaattaaagcaaggcttttttaatccggcactatacgatctgaatgtatggtgcttttttatttggatgaagtgatagtcaaatctcctttaaaacttacttccatatttacaatgctatatatggaagtttccggaatggccaggacagcttgataatgaaaaccgttccggtctactttcataaactttgtatctgacaggatggattgctccagaaaatcgacaggaagtactttgtcaaacatctgtttggtaacatcgctggcaaacaggctctttttaccttcatacacacaaatgtgcatcacattatcatagtatacattatccatgctaatcccgtcttcggaataagtcgtcttgatgactctcattttagaaggattaatatatacgtatgcgcgatagcgagtgccattataggtcactacactatcgcgtttggttacttccgtatatgccggaatgactaattcctgacggacaaaatagattgaatcattggcatcttcggatttatgcaacttaattacatcatccgttatggaatgaaaccagaatatatgttctgcctgcttatcaatcttgtaataagtagtatcatttccataagtataaagagtatcccgtattattttaaatgcaatgggagtactttgtacatctgcatagtagatagtatctccttctacacgcatcaacgggctctccgtttcatcgtccagccaaattccctgcagtagtccttttgcactaagatcctctttctcttgttgaagagaatggggactcttattgccgctacatgccgcgaaaaagattgccattaacgatacagccacatttttcatcatctattttagtttttatataaagatactcttatttttttatttaccaatacagtgataaataaatccgagttcttccatctcttttttatcatatatattacgtccgtccaacacaatctgccgggacatcgttttcttgataacggcccatgaaggcagacggaattctttccattcggtaaccaacatcaacacatcagcatccagtacggcatcatacatatcgcaagcataatagatagtatcaccaatcctgcgcttacattcttgcacggcagccggatcgtatgcgcgtactttacaacctgctttcagcaatttatcgatcaggactaatgccggagcctcacgcatatcatccgtttccggtttaaatgccaatccccacaaagcaacagtcttaccctgcaaatcaccattaaactgtttcattaacttttcgaacaagacgcttttttggttctcattcacttcttccacagccgtaagtacccgcatggtataaccattctgttctgctgttttaatcaatgccttcacatctttggggaagcaggaaccaccatatccgatacccgggtacagaaacttacgtccgatacgagtatccgaacctatcccactacgcaccatattcacatccgcaccaacaatctcgcacaagtttgcaatatcattcataaagcttatacgggttgccagcatcgaatttgccgcatatttagtcatttccgcagacggaatatccatgaaaatcacacggaaattattcaataagaatggtttatatagtttggacatcaatttctccgcacgtgccgactccactcccactaccacgcggtccgggctcataaaatcactgatagcatttccttctttaaggaattccggattagaagccacatcaaaatcaaccgtcacgcctctcttatccagttcttcctgaataaccgcacgaaccttactggcagtgcctaccggaacggtacttttggtaactaccaatttatactgtttcatgttgcgaccaatggtacgggccacctccaatacgtatttcaaatcagcgctgccatcttcatccggaggagttccaactgcactgaatataacttccacttcatccagacaactttccaatgaggtagtaaacttcaatcgctttgctttcatattacggagtaccatctcttccaatccattttcataaattggaatgttccccttttgcaaagattcgattttctctttgttcgtgtctacgcacgttacattcacgccaatttcggcaaaacatgtgcctgacaccagacccacataccctgttcccacgattgcaattttcatacttaatctattgtttgtttagaaattcattcaaaataaacggcgtccttgaaagcagttccctctctgtctttcgcagataataacatttgcgactctgccaacggccagtcgatccccaatgcttcgtcattatataaaatagaggcttctgcctgcggagcatacttgttatctaccttatatgtaaaaacagcttcttcactcaagacagcaaagccatgagcaaaaccacggggaataaaaaattgtctcttgttttcttcactaagcaatacacaaacatgctttccaaacgtaggcgatgatttacgcaaatcaacggcaacgtcgagcacttctcctttaagaacacgaaccagtttcgcctgactatgttctcctttttgatagtgcaatccacgcaatacaccaaaagatgatttcgactcgttgtcctgtataaagtttacgggaccaatattggcttcaaactcttctttcttataggcttccataaaatagcctcgttcatcggagaaaactctaggctcgatcagccatactccgtctatttctgtctgtatatagttcattattgatagtgataaataaaacgatgcaaaagtagtgaatttttcgaagttttctgggatatattcaatttatctcttaattttgcagacatgattgaattggcacaacatatagagactttactactggaaaacgactgcgtcattgttccgggatttggtggttttgtagcgcattattcgcccgcaacccgcgtaaaggaagaaaatatatttttacctcctacccgtacaatcggttttaatcctcaattaaaactgaatgacggcgtactggtgcaatcttatatgtcagcatacgacacaagttttgctgacgccagccgtatagtagaaaaagaagtaaacgaatttatcggtctccttcatgaggaagggaaagcccatctggataatataggcgagattcaatctaacatttatggcaactacgagttcgttccttatgattataagataacaactccttcattatatggtctcgactcttttgaaatacatgaactttcggctctgcagcagaaagaaaaagtattggtaccgacttatcaggaaaaggaaaagaagacttttgaaattagtatcaaccgcgcgtatctccgcaatgctgcagcaatgattgctgccatcgtactgttctttgccttttcaactccggtagagaataccgacgttcaaaagaacaattatgcacagttattgcccagcgagctttttgagcaaatagaaaagcaatcggttgcagtaactcctgtttatgttaagaacgatgctgcgcaacaagcaaagaagctttctgcttcttctgcttcaaccaaaacttcatctgctaaaaagcatacaacggataaagccaggacttccaaaccgatcgcagtaagagaagtggaagtggtaaaacaggaaacagcgactcctgctcctgcggtgaaatctcaagaaagtgcaaatcatccttttcatatcattgtggcaggaggaatcagcctgaaagatgcagaagttattgcgaaccaattaaaatcaaaaggatttgcagatgcaaaagctctgaacactgatggtaaagtacgtgtcagtatcagttcatttaacaaccgtgatgaagcgaccaagcaattacttgagctaagaaaaaacgaaacttataagaatgcctggttactggctaaataaaaaacccttttaaaaagcatgaaacgagttctttgtcctaaatgtgagaattatctttattttgatgaaaccaagtatagcgaaggccaatcactggtatttgaatgcgaacattgtggcaagcaattcagtatccggttaggaaaaagtaaagttaaggctcttagaaaggaagaaaacctggaagaagaagctgaatctcataaagaagaattcggatatatcactgttatcgaaaatgtatttggttttaaacagttacttcccttgcaggaaggtgacaatgtcataggccgccgttgtgtaggaacaaacattaatactcccattgaaagtggtgatatgagcatggatcgacgccattgcatcatcaatataaagcgtaataagcaaggaaagctagtctacacattacgagatgctcctagtctcacaggtactttccttatgaatgaaattctgggagataaagaccgtgtacgcattgaagatggcgctattgtgacaattggagctactacatttattttgcatacggctgaacaagaataataaataacttgataataaaaaatagcgccacttgttcagaggacagtggcgctatttttttatttagtcttctaattacagaatacctttaacggtctcaagcattcctttttcctggatagaatccaaatcagcttttacggcttctgtcaatcccggaatcttattcaaatcttctccccagataaaatctgcagccagaacaccttcggcaactttctttgtgcaacctgttgcccaaagttctttcagcaggttcatgatttcaggagcatcattcggaacaatttcagcaccatcagcacgtacaccacctttataataagtaatgatagcggctaaaccaagtaccagtcctttaggaagttcacctttacgttccagataagtcttcaatcccggcaaatcacgagtttcgtatttagggaaagaattcagcatgatgctggttactgcatgatccacgaacggattgttgaagcgttccaatacatcatttgcaaatttctccaactcatccttcggcaagttcaaagtttccatcagttcgtcaaacattaccttgtggatatatttgccaatcacttcgtgctggcaagcatcacgtacaatattcactcccgagagataggcaaccggagaaagaacagtatgcgggccattcaacaaagtaaccttacgttcgtgataaggagcttctgacggtacaaataatacattcaagcctgccttgtcagccgggaactcttttgcaacttcctgcggagcttcaataacccacaaatggaaaacttcagcctgaacaaccagattatcatcatattgcagtttttctttgatagcagcaatatccttgcgcgggaatcccggaacaatacggtctaccaatgttgcatatacaccacaagcttcttcaaaccaagttttaaactcattacccaggttccacaattcaatatattgataaattgtttctttcaacttatgaccattcaggaaaataagctcgcaagggaaaataatcaaaccttttgtcttatcaccattgaatgttttaaaacgatgatagagtaattgagtcagcttacccggataagatgaagcaggagcatcctcaagtttacaagccggatcaaaagcaataccagcctctgtagtgtttgaaataacaaaacgcatttcaggttgctctgccaacttcataaactcgtcattttgagtatatgggtttaaagcgcggctgattacatcaatcattgtcaagctgttaacagcctctcctttatccaatccttgaaggtttacatgataaagatcatcctgtgcattcagcatatcgaccatacctttatcaatcggttgaaccactactacactgctgttgaaatcagctttctggttcatgttataaataatccaatctacaaatgcacgcaaaaagttaccttcgccaaattggataatacgctccggacgttgtgttttaggagcagtttctttgtttaatgctttcatgttagttgtaatttataaagttgatattatacaaattcaaaataaaaatcaatgttttcctttatcaggatatcaataggcatgtattttacaggttcaacagacttcttaaacacgacatggtcgcacaacgccttcaccccacaatatccttgcaaacccggacgttgcccgattaaataatgcacatcaccggattttaataaatctacgtttgctttcagaaggtcatatcctatcagtcctttcatgctacgtcccgcatgacgaagatactctcccaactgatacactctggaattaaatacaactcccagtaaagccttcggatgcgcctgaaaaaactcatccaatgtctgttggttactttcctgatcggatttattaagtactacctcatggattaccaagttattatattcttcggcaatgtaactcataaaaccatccaaacggcgttgcatctgtatttcagccggattatctttattgttacttaaaaacaaaaccaactcctggccttctcctgccgaataattgcgcatcaatattttcgctgcgatatatccgctcttatatgaatcctgcccgatatacgtcaacgctttcgcttcttccatattgaaatcgacaaaagcataagcaatcttattttcctgtaaataggctgtcagcgccagtgtctcttcccgaaaattcggagaaatcaataccgcatccacattcttttcttttatagaaaggcaggcttcctgataactcttctcatccccatggtgatagcacaaataatctatactcacattaaaaggacgtaattcttgccgggcacgctcaatcccccctactaccgaatgccaataatcatgctctatataataaggtatcaaacagaggaaagaatatttctttttagcagccaaaccgatagcaaacacattgggctgataatgaatctcatccaacaccttttgtactttggctttgcttttgggagacacgtcaccgcgattgtgcaacaccctgtcaaccgttccggcggaaacaccggccatacgggcaatgtctttaatggtatagttctggtcctccatagtgctaaaacttaaatattataaataatcgctgcaaatatacgaattattttgttactccaagtaaattttctatttttgtgttcgataacggttaataaaactaaaacaagatttacgcctattagctttaaaatcaatactatataggtataaatatagaaagtaataattttatatacttaaaacacagtaataatgaagaacttcatggacgaaaacttcttgctgcaaacagaaactgcgcaaaagttgtatcacgagcatgcggctaaaatgccgatcatcgactatcactgtcaccttatccctcaaatggtagctgacgactacaagtttaaatcactgactgaaatctggttgggcggtgaccactacaaatggcgtgcaatgcgtacaaacggtgtagacgaacgtttctgtacgggaaaagataccacagactgggaaaaatttgaaaaatgggcggaaacagtaccttacactttccgcaacccattgtaccactggactcaccttgaactgaaaacggcatttggtatcaataaaatattgaatccacaaaccgcacgtgaaatttacgatgaatgtaacgagaaactgtctcaacccgaatattcagctcgtggaatgatgcgtcgttatcatgtagaagccgtttgcacaacggatgatcctatcgattcattggaatatcatatcaaaacacgcgaaagcggatttgaaatcaagatgttaccaacatggcgtcctgataaggctatggctgtagaagtccctgcagatttccgcagttatgtagaaaaactggcagaggtaagtggcgttatcatctccaactttgatgatatgatcgctgctttgcgcaaacgtcatgacttcttcgcagaacaaggctgccgtctgtctgaccatggtattgaagaattctacgcagaagattatacagatgctgaaatcaaagccatctttaataaggtatatggtggcgcagaattgaccaaggaagaaattctgaaattcaaatcagcaatgcttgtgatcttcggtgaaatggactgggaaaaaggatggactcaacaattccattacggcgctattcgtaacaataacacgaagatgtttaaattactgggtgctgatacaggtttcgactctatcggtgaattcacaactgccaaagcaatggctaaattccttgatcgcctaaacactaatggcaaattgactaaaacaatcctctacaacttgaacccatgcgccaacgaagtaattgcaacaatgctgggtaacttccaggatggttctatcccgggaaaaatccaatttggttccggatggtggttcctcgatcaaaaggatggtatggaaaaacaaatgaatgctttgtcagtactcggtcttttgagccgcttcgtaggtatgttgaccgactctcgttcattcctatcctacccgcgtcatgaatatttccgccgtacattgtgtaacctggtaggacgtgacgtagaaaacggagaaattccggcatctgaaatggatcgtgtaaaccaaatgattgaagatatcagctacaacaatgccaagaacttcttcaagttctaatagatagtagttacactataaaaaaataccgctaccaaagtcgaatatagctttgagtagcggtattttttattcctatagctgaactgtaacaacaaagactcttaacaaaaaaggagaaccttttaagttctccttttaataatctttgtacaccctcagggactcgaaccctggacccattgattaagagtcaattgctctaccagctgagctaagagtgcaacattttatttttattgcaacgtcgaatttgtacaccctcagggattcgaaccctggacccactgattaagagtcagttgctctaccaactgagctaagagtgcttaattcctcgtttgcggttgcaaaagtaggtcttttattttatttgaccaaacaatcatgcagcttttttactatctttttttcgtctttattcgaacacataaagctcggaaggcgtatttcgctttaaagcaagtagttgcacatttttgcctacaataacacctttgttctttaatttccattccaccgttttataagccagctccgggtgattattgtctttacttaaatggcataaccagatatatcgcaaatgttcagtaatattttccgccagaaactctgcagtatcagagttactcatgtgtccggttttacttgcaatccgttctttcagatattgaggataaggccccattttgagcatttcctcatcgtagttggcttcaagtatcagataatgggctttactgatataatgagcagctgtaggagtaatctctccaaggtcggttaagaaagaaaagactttgccatcaatttcaatgcaataccccacattgtccgttccatcgtgtggcacttcaaaagattcgatgtgaaaatcttccagcgtcataggctcttgcttttccagataacgaactgacgagctaagtttctccgtcatacaatagctacgattaattccagcatgaatacgtgcggttgtataaacaggaatattcattttttctcccagattacccactgctttaatatggtcagcatgatcgtgcgttataaataccgcacgaatactatccatcaagatattataatctttcagtgattttttgatagtacgtatgccgattccggcatctatcagtatcccataggtttcagtgcccagataataacagttcccgctactgccactcgccaggcttataaattttactttcatgttttatcctctttattaaaatgcaaaatgccgtcaacttttacagcaaagtgacggcaaatatacataaaaaagcagagaattaccgagaagcctccttctttttgtcgatggattcggtgatttttgcaaataatagtagcgctacagcggcaatcaggcctatagcagcaaagtaataccatatataatgggcatttccactagctgcctcccatgcttcccgcgtctcgaacaaagccggatccggacaatatttagtgagcagaattcccgccagaccaaaaccgaaaatggaagaaaggaatgaatgcaaatgactgaatcctaaatacattccttcttctcctttaggagcctgtaaagagaaatattccagataacgcggtgaaatgaaacattcggcaagcgcctgcacaactatacccgcaatcatcatcagagtaatattgctcatacctgtaataagatcattacccaacaaatttccacatgccatcagtaatgccgaaataggaatcaaaaacattcccacattcatcgaagtaatcgcactgcgtttggacatcaaacgagtgataaaactaacgcagcaaaccaccacaaacggattcacgttggcaatccaacccggttttgccgtctctccagccatacgaatcacatatttaggcatagtggcataaagctgctgttgcaccatccagaaacctgtaacaatcaaaataagaatcaataaacgccagtttgtgatgattcgcataaatccctgtccaatctcatggagactttttccttcacctgccgtatgcgtcgatttataaagaagaataacagcaagtaaagcaactattgtcatcgcaccggagaaataattaatatagatatacgcttgttcaccaatgacattacgcaaaggatcgataatcgttttaccggtgaaagcacccacatttaccatcatataaaatatggaataaccacgggcacgggttgcttccgttgtttctttagccacagaagcggagataatggacttaatgaaagaacctcccaccataagtacaaacaaaaccggcacgatgatccaccgggtatagctatcaggcaaaccattaaattgagtagtggcaccataactaaccaaaccggcagcttccagtaaagtgggcagtacacccaaccctaaatatccgatggataataaggaaaatgctataatcattgatttccggaaaccgatcttgtcagcataagcaccggaaaaaataggaagcagatacaatccaccggaaaaaagcccggaaatcatacttgcttcgaaatcattaaaacctaaaatggaagatagataaatagtgagaacgataaaaacggcataatatgccatacgctcaaacagttcgactgtgttgctgacccaaaatgctctcgtaaagcctttagcagcacgctgaggggaattgttcatgtatttatatttttattaaaatgttaatttgagacaaagatacgtttttttggcttactgtccgtatctttgttccaaattaggtaattaaaaactatgattatagctgttgattttgacggaacgattgtagaacatcgttatccacgcattggtgaagagattccattcgctgttgacacattgaagttattgcaacaagaaaagcatcgtttaatactgtggagtgtgcgtgaaggagcacttctggacgaagctgtcgaatggtgtaaagccagaggtttagaattttatgccgttaataaggattatcctgaagagcagaaaggccatcagggattctctcgaaagttgaaagccgacatgttcattgacgatcgaaatctgggtggtttaccagactggggagtcatttacgaaatgattaaagagaaaaagacgtttgcagatatctatagccaaaacggagaagaagaaaaaacatccctgaaaaagaagaaaagatggctgcctttttaggaagctgataaatatcaaactaataaaatagaaatgcactcttatctgacatgattagagtgcatttctatattcataaatgatttatcattcaacattgaatcgcaatttgctacgcttctttattttcccacttttccctaaactcccataattgctcaatagtgggatgaaaagtcggattctcccagtttctggaaatcattgcaatcaaagattccaaatacgatttaccatcaataatggtagtacatttattgacctgatatctttctgttggataattctttgtctcaatcatcttttttgcccagttcaataattcctgaacagcttcattgtcataagtatgttgtgccatatctttagaattttccgcaaagatacaaagtttatttattcataaataaagttgttcgtttctttttactataaagattccattttaaatttatacctttacgtccaatatactcaattagactaactaatagaaacaataattatgaagaaaattttcattttagtatgttcatgtgctcttttggcagcatgcaacaatagcgcgaaaacaaacaagagtgccggtgcagacagtacttcaatcgaagtaaccgatatccataatgcggaaaattcacttgattacgaaggaacttataaaggagttttccccgctgccgattgtccgggtattgaaacaaccctgacattaaatccggacaaaacattcagcctccattccgtatatatcgatagagacagctcatttgacgaaaaaggtacatatactttaaaagacaacctattgactcttaatgaagaaggcggagaactttcttattataaagtagaagaaaatcatttacgcaaactaacaatggataaacaagaaataaccggagaacttgcagaccattatgttttaaataaggaataaggtccaaacaaattttgctatcaatagagaacaaattcaatattttttatgtttatataaatagatataaacttaaaaatagaacaacttatgatttatagttttttatttcccacaaaatcgaatacaacgaaagtatctttgttgctattggctgtccggatcatcttcggtatattattaatgaaccacggtatccagaaatggagtaacttccaggagatgtcagcagtatttcctgatccgcttggaataggaagtcccctatctctcggattagcaatttttggcgaactcgtatgttcgatggcatttatcatcggattcctgtatcgcttggcaatgatcccgatgattttcacaatgatagtagccttctttgttgttcatgctaatgacgtatttgcggttaaagagctagctttcatctatttagttgtatttatattgatgtatattgccggtcccggtaaattttcaatagaccatatcataggaaacgaattgtcacggcggaagtcaagagtatacaaaaattagaaataacagccccgattaattaaaaaatattatatttgcatacacataagagagaaattatcaatattttttattaatcaaaaacattttaacatgaaaagaggaaaactgactttagtcgcagtagtacttagtggtagcttattattcagttcttgtgtaggatcatttggtttattcaaccgcctgtcttcctggaatcaatcagttggaaacaagtttgtaaacgaactcgtattccttgctttcaacattgttccggtttatggtgtagcttacctggctgatgctttagttatcaactcaatcgaattctggagtggctccaatccgatggctaatgtaggtgacgtaaagaaagtaaaaggagaaaacggcaactacatggtgaaaactcttgagaatggatattccattactaaagagggcgaaactgcttcaatggacctgatctacaacaaagaagccaacacatggaatgtcgttgcaaacggtgaaagcgctgaattagtaaaaatgaacaatgatggcactgctgatttgttcttgccaaatggcgaaaagatgaatgtaacgctggatgctcaaggcatgctggcagcacgccaggctacaatgagcaattttatgtttgccgcccgctaaaaataaaaacaaatacgaaggaggtgtgtcgtaatgcacgatgcacctctttttttgttcatcactatacaaatctgttcactttctttaagctgcgatcttttgaagatttctttgatttatgtgttcccagcatctaaaaacagcagttgtaagctcataaaacagtctaatcagccagttcatacccttttttgtcagttttgcacacatcttttttatattgaaggcaatggctaggaaggcaaagtccatgaagaccttgtcctttccaaaatgtcggaaacgtttgtagttcatattgtttttaatttgtccgaacacggcttccggttctatgcatctctgccctctgtgtttcagtcctttctcagagcagagcagttctttggctctccgcttgtattgtctaagcctatgattcagttctatcgtcctgtttccttttgctttaaaacagcggcatcgcaggggacagccttcacacctgacagctctgtaccgtgcattttcgttgacatatccggatgcggttttcacattcctggtgcctatcctccgcatcctttgccccatagggcagatgcagaagtcatgttcttcattgtagtagaagttttcggccttgaacgggtccggtttgaatctcggccgctgctccatgtggaaatagttgtactttacgtaggcttccatgccgttttcggacatgaagcggtaattctcttcggagccatagccggaatcagcaaccaccgtatgggccatccggtcatacctgtttgaaaaagattgcaggaaaggaatcagggtcagtgtatccgtagggttcgggaagagtgcaaaatcggtgatgaactgattttcggtgccgatttgaaggttgtaaccgggcttcgtctgtccgttgcgcatggcatcctccttcattctcataaaagtagcgtccttgtccgtcttggaataggaattcctctcttgcagcgtttccagatggcagtcgtattcctgcagtttgtccctgtgttcttccagttccttcaactgtttgcgtttctttttcagttcagtcttttcctctttcgcggatggctcggaaacctgttccagtgcatgacgcaattctcctgccatttcagtcagcatggccggagtgaacccaacctcctcattgttctctgatgacttctcccgggcaatgacatcgtctatctgccctaacaggacatgtatcttcttcatcaggcgttcacggttccgctcaaccgtttttcgccagacgaaagtgtacttgttggctttggattcgatctttgtcccgtcaatgtattccacattcaggctgatgaagcctttggaagagagaagaactacggtttgcgtaaacacctcgttgatttccttcttcacccggttgcggaaacggttgatggtaatgaaatccggtttctcatatccggccagccagatataatggatgtcacggtgaaggagcttttcaattttccggcaggagtagatgttgttcatataggcatacagaatgaccttgagcatcatcctggggtggtaagggctgcgcccgcattccttatacagctttctgaaactttcaagattcaagccctcaaccagggcgtcaaccatgcgcaccggatcgttttctgcaatatcctcatcaattctttgaggaaaaagaacggtttggttgggattgtaaggacgaaaatgtatctttgtcatagtgaaattcttatgcctaaagatacaaaatctttaggtaataacaaagccccagcttgtgaaagtcggggctttgtgcgtaaaaaacagaaggtgtgcattttgacacaccttctttttcaatcttatcttcttctatcaagaatcttttgtactatgaataaactacatacacttatctattctgttctaatcttcacctgtctatcttgtcagcaacagactcctcaaactcaaatagaacagacagccatagatttttgtgaagccttttataatttcaattatccggtcgccaaagaatggagcacgccttcttctcaatcttatcttagtttcttagcatctaatgtcgggcaaccccatctggagcaacttaagacacgaggcgctgcaaaagtttctgttatttcaagtgagatagatgctaatttagaagaagcgtcggttgtctgccaaatcaaaaatgcattcgtcattcatcccatcggaggaaaaatggaatacgtaagttccctgcaagatacgctcgaattagtaagagtaaataataaatggctgattagaaaggatatcccacagcaaaatggaaagcaaagtcacgactgaatttaggatgaatgatggggaaatgctctttcctcgtttcataggcaggattgacagctttcatacctccgtcaaaacgcaaaataaagaaatccaaatccaggcggagacctaatccgtaggccactgctatttgcttataaaacctatcaaacttgaaaacccctcccggttgattggcataactccggatggtccagatattaccagcatcaataaataccgccccctgaaacttccagaataacttgcttcggtattcaatgctggcatccagcttaatatctcccgattgatcgagcaaatttccatttccggcaaaagaacccggtcccaaatcgcgaaccgcccatccgcgaacactattggctccaccggagaagtattgtttctcaaacggaatcgtttttgcatttccataaggtacagctattcctacaccggcatgaaacgcaaaggagttacgatggtcgattctgatattcttggcaaaatcaaactctcctttcagatattgagcataaggaattcccaaaatagcgtactcaccattactattcttccgaatattggtagccttagacagggcatacattatatttcccgccgactcgaaattaaaacggatggagtatgaattagaagcaatcgtattgttgataatagatcctcccacgctattataattatagctatatcccatatttacaatcaatcgattctgataattatactggaaaatatggttctgtcctttattaatataatcttctttaaacctgtcagagatacgaggcaaatatagaaaagcaatattaatcaaatcaatacggtgttgtatcttctgacgttgcgtccacttgtagctccagttggcagaagccatcgtacgcaggaattccgggcgcaactgataattatattgcaaaccaaactctgttgtcgccctgattttccgtttaaaatcagaggaaatgaaagggaacaggaaattagggaagttgatactcgtttccaccccgtactctgtatagttattattcgaataacctgcctgaagtccggaaatgacttcatacgctccacggaattttatcataaaagtttccgatccgcgaaaaagattcctgttctggaaagagacggaagctgccgctcccaagtcaccggcagaattagttccctctacctcgaaagctactgatttatgcttgctcttagtcagcatcacataacaatcgagcatcgttgaatctcctatttgagtctcaataaaacggatattcgtatatttcaatgccgataaacgtccaaaactggaataggtctgctgcacatcgcgctcattatacaggtcgccggaagcaaaccgaaggttatccgtaagaactttaggacgcaaatagagtttatccttatagtaaatcggatatcccttataatgaaccgaatcattgatgtccacactactcattgccgaggactgcaaaacatcataatccgtaataaaattaatcttattgatccaatattgccgatgtgctcttgccgaatcattcgcatgagctttatacatctgcaaatgttgagtcagatctacattataagtattacgaacggtatcggcagtatatccgatataatccttattaaacttatagtaaccattccgaagtaacttattcgtgatacgttgcctgtccgcatccaatacattcacatcaaaatacattccttccttcagcaaacttctggcagaatcctgtttgagaagcgcagctattttaggatcataaatatcatatttgatagattgaacaacgtatggcttgcctgccgttacgtcataatatactttgatctttttcttttttactttggtcgaacgtttcactgttgccgccatatatcccatattatgcacagccttagtgatctcttcttcagagcgttgcgcttcgtcctcgctatatattacgggagcatcccctattcttctcaagaacttattcccccatttggtcgaatcacgccccgacagattgtatacataaagttgggtctttatcagactgaaccacttggcattaggattttggcgaacatacatgcgcaaggaagaaggccgtatatttttttggtccgtacgaattttgacttcatccagcaaataagatccatccggcacaaacttagtggtagtacacgaagcaagtgacaagacagcagcagaagcaagcaaacaaagaaaatttctcctcatacggttttacatcgatagcatgaaaaatgcgcctacaaagataaattatattttccgacggggaaaataatttaagaaaaagacgaagaaagtaagggtagattggaaatatctttatagctttgcaaaagaatatcaaatctatggcatcattaagtaaaaacaaaataaagtatatccactcgctggaactgaagaaaatacgtaaagaagagcgggtattcctggctgaaggtcctaaattggtaggtgatttactcggacatttcccttgtcgttttttagcagccactccctcctggtttcaggagcatccgggtattgacgcaagtgaactggtagaagtttcacaggaagatctttcacgagccagtttattgaaaactccccaacaggtacttgctattttcgaacaaccacaatatactttggatccggaggcagttcgttcatcactttgccttgcattggacgatgtgcaggatcccggaaatctgggtaccattatccgtttggccgactggtttggcatcgaacatattatctgctcgcagaatacggtagatgtatataaccctaagaccatacaagccactatgggtggaattgcccgggtgaaagtacattatacttccctccccgattttatccggtcgctcggagatactcctgtgttcggtacgttcctggatggaaaaaacatgtatgaacaaccattgtcggccaatggcttgatcgtaatgggaaatgaagggaatggcatagggaaagaggtagccacattaatcaaccgaaaattatatatccccaattacccggcaggccaagagacatccgagtctctgaatgtagccattgctaccgcagtaatctgtgccgagttccgtcgacaggctgcatggaagtaaaatcaaaaggataaaacaaataaggaaataaagcttcccccttcttttctgcttcctgcagatactcattaaaacattgggaagattgattcgaaacactgggaagattgatttgaaacactgggatgttttttaaaatcatcccagtgttttttatttcttccatctgactttcagaaagcagcactatcactcccggcatccattcaaccgattcaatctcttcggtcaatgagaatacacctcggacaactccttcgtcagtgatctccactacctgctgcttcatatatccgacggcaggtatcagcaaataatgagaagcaaagcgtttcattacaatcagttgtttgaacgtctttgttgttgcctgcgttgattcatctggcgttcttttctttgctctatccgttccttttggatatgctgttccacctgaatctgctccggcttcttctcacgatgagttcccgtacgacgacggttcatctcttccggtgtcagacgctgaatgtcatctttattcttgtctatgaccttatgtaaagagtcggcattttctttagtagctatcttcttcaaagaatccgctttcaatgcttctatcttattcaaagaatcgcgtacggcaaatgcgagcgtatccgtacaatgataacgagtcatcatgaagcggtcggccaatactgctccgcctttttcctggctatccatcggataataaatgaaaccttttatttctttcatcgaacctaatgtgtctgcaaacaaacgaatttgttgcacacccggttcagtcaccattttccaatgattgatcgtatctttttcataaatcacctgcatagccatagtgacacctcttaaagagtcggcaagcatcggctccaggaaacgataccgcacttcccataccaatgtatcccggtctttgtagttagagtcggtcggcaaagtaaatacatattgattatccatcatttcaccggtcaaacgtaccatacgctgccacggccagacatcgatgctatcaccctgcttagtcattttcggtttcttatcacgcttggctatcaggtcgccaacaagttcctgttcgtctttcaagcgttttttcaccttatcataaattttcgataaaatctctgtgttacgggtataccaaaccatggatgaatcaaatgcagcttgtgtagtcccgtatttcttgaaaacggcgtcgatatacaatgctttcttataattctcactataaggcaaattatctcccatagactttgccacatgataatcatacagcaaattctccatcttcgattccgagattacatcactgggtcttttcactttacacccggctaccgcaaaaacgaacatgcagatgagacacagatgaaaccgaaatttatttttcatgatccgtagcttcctttttatctttatccagtgaatgataagactcattcaaatatttactataaaagagtaataaggcaatgataccgcaactgatagcagcatctgcaaaattaaagatcggactaaagaatataaaatgctctccacctacaaacggcatccatgtaggccagtttgtatctataatcggaaagtaaaacatatccaccacttttccgtaaaaccaggtagaatatccaccaccttcgggcatgaaactggcaatctgcgaatgagtgctttcattgaaaataactccatagaacacgctatctatgatgttccccaaagcaccggtcagaataagagccacacagacgatataacctgttttgaaccctttctttatgattttatagagataccaccctatcaatgctaccgcaacaatgcggaatgttgtcaggaataacttgccgaagatttccataccgaaagccatcccgttattttcggtgaaatagatataaaaccaatcggtcacacgtatactttcgtgccagtacatgtgagttttaatccagaccttgatgatctggtcaataatcaatacggaaaagataacgagaagggcaattctccccttcgtgaatagtttcttcatgtgtttattataagttaaacataacgagctacaagtgccgtgcgtaaactttgcgcagctacttgtagctcgttacctgtagcctacttgctatctgttattttttaccactgttctttgcttcaatgcttaatgtagcatgaggaacagcacgcagacgttctgccggaatcaactttccggtttcacggcaaatgccatacgttttattctcaatacgtaccaaagcagcttgtaatccttggataaacttcaactgacgttgtgccagtcgggtcgtttcttccttggagagcgtattagctccttcttccaatactttatacgtaggagatgtatcgtcggtatcattaccgtccagtcccatcaaacttttcttcaactgttcatagtcacgttgtgctaattccagtttctccataataatggcacggaattcctcgagttccgcatccgaatatctagtcttttctgccataactttacaattttaaaaggttaatcaatatagtattagtcttttatcacgttcacaaacaatgagaagtcgtcaaactccagcattgttccgtctttcacttcatctacaagttcaagagatgtgcctaaaacctggttacaaatataagtattatattcatttaccgcatcatctgtttgcgtatttttcgagattgttatttttattttgtctgtaatctcgaagccgcttgacttacgtatattctgaatacggttcaccagttcacgggcaataccctcgcgacgcagttcttcggtaatggtcacttcaagcgctactgtcagtttgccttcattggcaaccaaccatcccggaatatcttcactaaagatctcgacatctgatgcttcaataacagcttccgcaccatccagatttaatgtatactttccgtttttctccaattcaccgatggcctcctgtgacatttctgcaacagcagcagctactgctttcatttgcttgccaaatttcgggcctagctttttaaagtcacatttcacttttttcaccaatacaccggctgcaccatcaacgaatctgacttcttttacgttcacttcattcataatcaggttcttcacagcttcgatatgagctttctgctcttcatctaccaccggaaccatgatacattgcagcggttggcgtaccttgatattcaccttgcggcgcaatgccaacaccatagatgtaacatcctgtgccatttgcatgcgggcttccagttccttgtctatcatttcttcctgatatttcgggaattcggcaagatggacagaaactacattgtcgcgtcctgttgctgtaatcaagtcagtatacaaccggtctgcatagaacggagatacaggagccatcagtttggcaactgtttcgagacaagtgtacaatgtctgataagcagacaatttatcctgtgtaaattcaccaccccagaaacgtttacgattcaggcgaacataccagttggacaaattatcattcacaaaatcagaaatcaaacgtcctgcctttgtcggttcatattcattatagcatgtatctacctcctttattaatgtattcaatacagacaagatccagcggtcgatctccggacgttctgccatcggtacatccgcttctttatactcaaatccgtctacattcgcataaagcgcaaagaatgaatacgtattatataaggtaccgaagaatttacggcgaacctcttccactccttcaacgtcaaatttcaggttatcccatggagaagaattggtaatcatgtaccaacgcaacgggtcggaaccatacttttcaatcgtagtaaacggatcgacagcgttattcaaacgcttggacatcttgttaccgttcttatcgagtaccaaaccgttagagataacagctttgtaggacacgctgtcaaataccatggtagcgatagcatgcaaggtaaagaaccaaccacgagtctggtctactccttccgcgataaagtcagccggatatacctgacggttatccaacagttctttattttcgaacggataatggatctgcgcgtatggcatagcacccgaatcgaaccatacatcaatcaggtctgattcacgcttcatcggtttgccgtctttcgataccaatatgacgtcgtctacataaggacggtgaagatcaatcttatcataattttcttccgaatattgacccggcacgaaacctttatccttgtatggattggatttcataaatccggcagctaccgatttctcgatttcattataaagttcttctacagattcgatacatatctcatccgtattatcttctgtacgccagataggcaatggagtaccccaataacgagaacggctaaggttccagtcattcagattttccagccacttgccgaaacggccggttccggtagattccggtttccagttgatggttttattcaattccatcattcgctccttgcaagcggtagaacggataaaccagctatccaacggataataaagtaccggtttgtctgtacgccagcagtgcggatagttgtggacatgcttttctatcttgaaagccttgttgtctgctttcatcatcatggcaatgacaatatccaaagattcggcagcttgcgcagctttctcatcgtatttgccatccaccataaattgaggatcataagcatttttcacccatgcaccctgatattctttgtatttatctacatcaacacattcttttacgaaattctcatccagctcattcaacagatagaatttaccagttaaatccaccatcggacgagtttcgcctttcttattaatcatgaacagtgacgggattcctgcagcacgtgccacattcgcatcatccgcaccaaatgtaggtgcaatgtgaacgatacctgtaccatcttctgtagtaacataatcacccggtattacacggaaagccttatcactaggcttccagttgccattttcggatacctcaaccggttttacccaaggaatcaactgctcatattccataccgacaagatcagtacctttgtattcggcaatcactttaaatggtacaagtttatctccggctttgtagtcctccaatttcagatcagcagcttttgcattgaagtgtacattcaataaagcttttgccagaacaaccgtgataggttctccggtataagcgttgtaagactgtacagccacatagtcaattttgggtcccacacaaagagccgtatttgaaggcaatgtccatggagtagttgtccaagcgataaaataaggagttccccattccgtcatttccggtttaggattcttcattttaaattgggcaacggccgttgtatcttttacatcccgataacagcctggttgattcaactcatgtgagctcaatcctgttcctgcagccggtgaatatggttggatcgtatatcctttatacaacaatccttttttatgcagttgcttcaatagccaccataatgtctcaatatagcgattatcatacgtgatataagggtgcttcatatccacccaatatcccatccgatgagtcaggtcttcccactccttggtatatttcatcacgtctttccgacaagccgcattgtagtcggcaacagagattttcttaccaatatcttcttttgtgatacctaatgccttttctacacttagttccacaggcagtccgtgcgtatcccatccggctttacgcttcacctgataacccttcatcgttttgtagcgacagaaaatgtccttaatggtacgagccattacatggtgaatacccggcataccattagccgagggaggtccttcgaaaaacacgaacgaaggacagccatcacgttctgtcatactcttggcgaaaacctggttctcgtcccatttcttcagcacatctttgttcacctgcgaaaggtcaaactgcgaatattcagtaaatctcttacccatagctgtctacgattttactatttacaatttacaatttgaggggtatccccatttttaagggtgcaaatttacaaaaacatttgtttagttgagcaaaaagctaggacttttaatcggattcgtgtgaagttaacgattataaaccgcctacagcctaaacaaaacaggtatctccttgttttagtgggaaacctaaaagcactttaacttatgaattacggtattagcattttattcagagcaatccctttggcgatggctattttttgcttcggatacggagcgtttatttatggttatggagatgacgggagtcgtgttgtggccggtcctgttgtgttttcactcggtatgatatgcattgcactgttttgcacggctgccactatcatccggcaaatcatacatacttataataaatcggccaaatacattttgccggttataggctatctggcagccatcattactattattggaggcatctgcattttcagtaatgccacttccacctctgcatttgttgcaggacacgttatcaccggcgttggatttattaccacttgtgtagctaccgccgccacctcttctacccgattctctttaattccgagaaattcaaaagcgacaagtaatgaagttccggaaggagctttttcccttaatcagagacgggcattggtcattgttgccatcatcgtttcgctgatcgcatggatatgggcatttgtattattaggcaacagtcattctcatcctgcttattttgtcgcggggcatgtaatggtcggtctggcatgtatttgtaccagtttgattgcactggtagctaccatagcacgtcagatacgtaatgattattcagaaaaagaacggaataaatggccgaaactagttttattaatgggatctatctcttttgtatggggattattcgtgattttggcagattccggaagtgcaaacggtaccaccggatatattatgctcgggttggggttggtatgttacagcatttccagcaaagtcatcctgctggccaagatatggagacaagaattcaaattggccaaccgtattcccatgattccggtattaacagcattggcttgcctgttcctggcagctttcgtattcgagcttgctactatacatgctgattatttcattccggcacgtgttttggtaggtcttggagctatttgctttacgctgttttctatcgttagcatattagaaagcggcacatcttccaaataaaaaggtattccctaaaaagggcgtcactatatgccccggatagtgacgctatccaaggcatatagtgacgctatccggacggcatagcgtcactcttttattttttgaatctaacttcataaacatcgtttctacgatctttcaaattccgcacactaccataggtatgaagctcattcaataagtccaagtccacatccgacactagaatcatttcagtatttggagttgcctccgcccgttttccatctgttggaaaagcaaaatcgcatggcgtaaacacacccgattgtgcatattgaatatccatattgtgtacacggggaagatttccgacacttcctgcaatgaccacaaaacattcattttcaatagcacgtgcctgtgcgcagacacgaacacgggaataggcattctgcgtatcagtcaaaaaaggcacaaataaaatctgcatcccctgatctgccatcaaacgagaaagttccggaaattccacgtcatagcaaattaaaacgccaatcttcgcacaatcggtatcaaatgtctgtaataacctgcccccgctcaatccccaactcttgatctcatccggagtgacatgcattttttcatacatctcataggtaccatcacgacgacaaagaaaccctacattatagagaagtccgtcttccttgacatacggcatactcccggtaataatattaatattataactaatagccaagtttataaacctgtcacggatttcttctgtgtactttgccaacccgcgaatagcttgtgattcccctttatcattatacttcgacatcaaaggagcattgaaatattccgggaaaagaacgaaatcacttttataatcagatactgcatccacaaagaattctacttgctcgaacaggtcgtccaacgttttataactacgcatctgccactgcaccagtcctacgcgaaccgtagttttgggactgatatattcctgtgtaggtggctgataatagatgttatcccactgcagcaaacaagcataatgttttgattcttcatcatttggcagataattagtcattaccttacgaacgtgaaagtcattcgacaactggaaagtaagtaccggatcataaatctcgcgttgacgtacccgttcgatatattctttcggacgcattttgtcagcatatttatgataattcgggatacgtccgccaaacatgatcgctttcaggttcaatgtttcgcaaagctccttacgatattcatacatacgacgtgcgagacgcaaaccacgataccccgggtggataaacacttcaatgccatacaggatatttcctttgggattatgtgtattgaatgtttccttacctgtaacctgtgcatacgtatggtcattctttactttatcataatcaacaatgatagaaagggcacaaccaacgattttatcgtcaactactgtgacgatctgaccttccggaaaaatctttattaacttttgtatctgctcacgagtccaaaacacatcgctgccgtcagaataaacacgggtaaacgattgggatagttgtacataatcttctatttgcagattacgtatctgcactttattaattttaatcggatgttgttccataacaatatgtgttttataaaagataatgcaaaggtatagctattcctttaattgtgttttcaaaccaagaaataattaacaatactatctattttatgcattctttttctgcaaattccaaaggtgaagaagcactccttcacccacaaaattcttactcacagataattcagaagaaagatgaaggagtagaaaaaaacgtttcttatatatagagaatgctgcttaaacagaaagagaaaaagcagtgttttaagagaaggaaagcggtgctttaagtaggctaaagcaatgctttagctgcggaaaatagctgcttttatttgattctgcttcttctatccacttctctctagtctggaaaattctaaaggcaaaacaattagattttccaaaggattttttttaagccagaaaccgatatgagaagtcatagaatcaacttttgaatcattttcatataggatgcgtatataaatactatctttgcgaatatcaatcataaataaaagagtaccccaaaaggtaaagaaaatatatgaattccaacaaatcctcctatcaaggacaaatcgagacaattcttcattatctaaattccatgatacaaaagaattggacaggtaaaactgccgatgagttcaatcgtttgatatccatacctgaattagctaaaatggcatgcatgtctgttcgtaatcttcagctgatgtttaaagcttacactagcgaaacattacatcaatatatcattcgtacacgcatggaatacgcccagcaattactcaaagataataaaaaaagtatagctgaaatatatgaatatattggatttgctaaccagtcagctttaaataatacacttcaaaaaaaatacaatctcactcctcgagaactacaaaagaaattattggaaacaagtcatacttatccttcatatatttctccttaccgcatagtggaatcagaaacaatacctgtcttatttttatcttatattggcaattatgacacttgtagcacagttgcttttgagacatacacttgggactgcctatatgaatatgcaaaagaaaactctttattgccagataaagaagattattgggggatagcttatgatgatacggacattacctcattagaaaaatgccgtttttacgcttgtatagctattcaaaaaggaataggaaccaatccccctcttactagtccaataaaacacatggatttacctcaaggtacatacgcagtttatgtccatcaaggagattatgcattgttagatgccttttatgagacaatattgaaacaattaccgcaattttatagcttaggagaaactccaatcctggaacattacttgaactctcccactgacacagatgtgaaagagcttcttactgaagtttggattccaatcgttaaataattttgtataagggcgatattgcacccttatacaaaattagtagctatcatgcctgatatacactttctatcaaagacttaggacaatatccgaggatgtcaatagaaattttctcggcttcttcttttgagatgttatcactaacgatatagttcctaaataccttttccttttctttatatgcataagatgaaagcagcggccctatgatcgttcgtaattgcaagtttttaaaatcgtcactttgcttgtcacttagaccaacacgtgtagaatgcatgatgattgatttactttctccatcacggcaatctttaacagcttcttttaaaacagattctttttccaaagtatcataatctacattcttatcctcaacaataaattttaaaacattattcggtccaaatttaattgtgccatcatcaaacttagcacttcttattaagatgccataatatgcattaacgtcatcagataaacaaatatcaatacctcctcttgttccacctttaaattttgaattctttgttatacctgtacgatgaacataaaatcttccataattatttttttgcagttcatttccatgcacaaactcatcattaaattttgcatctttaaaataagcttctacttcaatagggtaaattcgtagcccattacttagttcaaacatatagtttgtgactattagcttattaattacttgaagctgtttctctatttccttaaaatcaatacattgcattaaaactgcaatttcctttttcaaagtatccataattattatagtattaatatttctttgggtaaagataatctttttagtaaagagttgttccgaatatatcaacttttttatttctcacttagatgatatcaaatagtcaacaacagagtcccaattcggatacagttccgaaccaaataagattaattcaccaccaaaattttcagcaccatttttgaggcgatcatctatcaaaaagtctcctttgttcaaatttttatgatgactaagaattaatcgtttataaccatctgtacctaaccattttctcacccatattagtttatctgaccaggcagaaggattattccaaggtgccgtggaaagaatatatacatcataaaaacgcactaaatgatggtaggcattaattgctccttcatacggactcattcttgcaaaaatattaggtacctcatcatatcgtccttcatattctctcttttcgtattcactcaagttgttaatacctgattgaaagtcaaccagaacattatccatatcaatataaagtataggtttggaaatcggtaatgctgatatcatataatttctataatttactcacagtccaagacaaacaattcaatgcacctccccatttctttacaatcggagctatattaacttggtaaattcgtccctcataggaaggatataactcttttatctgttctaaagcctctccatctgtagataatccaagtccgggaacaatgattatatcacgtgtctgaagcatatttatgtatgcccaactattctcataatacttactaagtttcaaatccacaactacaaaaacgtcattcaatctacgtctcatctcccgttctatcttttgaggatacactttcaagttgaccaaaatcttaccatcgccaatattgtgaacaattccatctgtatgaccacagatatcatatctatcccatggtagaaatataatatctgctccataaaagtttgcctttaatattgccagtacttctccttgatcaatctgcgaattttcttggaacaccttttctgtcatgataataattggtttccgttctcttatacatgatcccacccacttagaatttccctcacacacaacaacattccctccatcaactataagtggcgattgaataatatctatcttgatactcgtggctttaagtacgggaataatattagttttatactgtggtttatccgtcaaataatcaggttcatagcgaaattgaatataagtattaactccccactgtattggcatataatctcggcaccaataatctttagtgtgcatcaaagtcccatgcgctatatgatggcgagaaagaatattagataattcttcataaactttagggtagtgacgtacaaaaaggttcgaaaaataaacagtatctttatattgctctgttatcatacttcaatttttataatgcaaagataagcgtatcattggagaacatatttactcaaaaatgcaaaaacactaattgtaacaccaacgataaaacaattaatgcaaaataaaatattgatttactgaatgatatgtatataaacaattatgacaccataccattggtacgatgtcataatcttaatagaaccatgccaagaggccgaagtcataatgacatgatgaaattacactaacctaatttatttatttttcttccaaagtttgctcatatcttccagtgtcttacctttcgtttcaggtacccaacgccaaacgaagatagcagcagccacacagattatgccatataaactatatgcaaacatcgggctgaagtcatacagtgctgggaaagtagaagatacaatataattgaatatccattggaaagctacagcgattgccaccgctttaccacggatggtgttcgggaatatttccgagatcaacacccagcaaatcggtccccaagacatcataaagaatgctgcatacacaatcactgaaagtaccgggagaacaccctttattgccatgctatcacacattgctaccgcaaatgcacctacagccataccaatagaaccgattatcaacagtggtttacgtccgaagcggtctacagtgaagattgcaaccaatgtaaagacaatgtttacaatacccataataactgtctgcatcatgccacctccttctgcacctgcattttcgaaaatacgaggagcataataaagtaccgcattaataccgatagcctgttggaatacagaaagcaaaataccgatcacaattactgccactccataagtaaagattttctctgtcttttcatgagcagtagctttaatatcattaagaatttcctgtgcttttgtcttaccattgatcttttcaaggatcgaataagccttttcatcttgctgtatcaatacaagataacgaggagtcttgggaacaaagaacaataacagaccgaagaaagcggcagggaaagcttccgaaccgaacatgtaacgccatccttcatacacagtccacatatcagattcagaactaacagacagtacaccggctgcatctttcaaaattacaggattttgatggtcgcccataatcaggaaattcacgaagtatactaccaacataccgaagatgatagcaaactggttacacgatacaagcattccacgaatattagaaggagcaatttcagcaatatacatcggacagactgcagaagccagtccaacaccgataccgcccaaaacacgatacaaattaaaagcaatcagcaaatccatgttcggctttccatattcgaaaaacaagacttccggataataggaacctaatgctgaaaggaaaaagagtacggcagcaagccttagagaattacgacgtcccaaacgggaagcaaatataccggagatcgcaccacccagtacacagccaatcaatgcgctggaagatgtgattccatgcattactttattgtattgaaaatcagaggccgaaaggaaaaaagcctccaagcctttctctgcaccggaaataaccgctgtatcgtatccgaaaagcagtcctcccaaaatggcgacagaggttatcgaatataggtagagtttactaccttcgttcgttgtattaatcatggttataagtagataaagtagtgttgtagtagttggatttatatcaccacagatttcacagattgacacagataaaattcaaaataagagagaagaaaatcaatctgtgacaatccgtgtaatctgtggtggggttaattagcaatacatattcagaattgcttcataaagttcttgtttaccgctagtctgtttcggttcaccgtttgcttttgcataagcaactacatcttccaaagtcaacttgccatcttcaaactccttacctttaccgccatcaaatgaagcgtaacggtcagccagcattttcttatagggagattcgttcagcagagcagctgcgctttccaatgcacgagccatagcgtccatacctgcgatgtgagcgatgaagatatcttccaggtcagtagagttacgacgagttttagcgtcgaagtttgttccaccgttacccaagccgccgttgcggataatttgcatcatagcctgtgtcagttcgtagttgtcaatcgggaattggtctgtatcccaaccattctgataatcaccacggttagcatcgatagaacccaacatgccgttgtctactgctactgccaattcgtgttcgaaagtgtgaccagccaaagttgcgtggtttacttcaatgttcactttgaaatctttatccaagccatgagctttcaggaatccgattactgtttctgtatctacatcatactgatgttttgtcggttccatcggtttcggctcaatcaggaaagtacctttgaaaccacgggcacgagcataatcacgagcgatggtcagcatttttgccaagtgttctttttcacgtttctgatctgtattcagaagagacatatagccttcacggccaccccagaatacatagttctgaccacccagttcgatagttgcatcgattgcattcttgatctgaacagcagcacgagctactacatcaaaatcagggttagtagcagcaccgttcatataacgtgcatggccaaatacgttggcagtaccccacaacagtttgatgcctgtttcagcttgtttctgttttgcgtatgctacgattgctttcaagttagcttcgtattcttcgatgcttgcaccttcagaaaccaagtctacatcgtggaaacagtagtattcgatacccattttctgcatgaattcgaaacctgcatccattttatcttttgcagcttgtatagcgtcagcattactattccaagggaattgttttgttccgccaccgaattggtcgccaccttcagcacacaaagtatgccaccatgccatagcgaatctcaaccaatctttcatcttcttaccgttgataaccttttcagcatcgtagtaacggaatgccatcggatttttactatctttaccttcgaacttaatcttttcaattcctgggaaaaattcttttgttgccataattcttttattttttaaaatggttattatttaaattgttaattatttatctgaagatagaaccggagccggtatgttaccggtcatcgacttttcaagacggtatttccattttgcgtacgcgtcagcatattcctggtgttttgccacattaggctcaatcacatccagtttgtcaagcgtagcaaatgcctcattgttatccttgtagatacctgcaccgatacccgcacctttcgcagcgcctacggaaccgtctgtatcgtaaagctcgatagtagctcctgtgactcccgccaaagtatcgcggaagatagaactcaagaacatattagcgtgtccggcatggatcatcttcacaggaattcccatttgctccatgatatcaatgccatatttaaaagagaatacaataccttcttgagcggcacggataatgtggtgtttgccatgtgcattgaagtccagtccacggatgctgcaaccgatttctttattattcaacatacgttcggcaccattaccaaagggcagaatactgattcctgcactgccgataggagctttggaagccaatacattcatttcattataagatattccttcgggagcaatgttgcgttttacccatgaattgagaatacccgttccgttgatgcaaagcaatactcccaaacgtgtctggtctatggtatgattgacatgcgcaaaggtattgacgcgtgactgcggatcatagttcacttcaccgttcacaccataaaccactcctgatgttcctgccgtagaagcaatctctcccggattaaacacgttcaaagaaagggcattgttaggctggtcgcctgcacgataagtaatcggtgtcccttctttcagtccaagctctttggcagctattgcatttacacgtccttgttcagcgaaggtcggcttaatatctgcaatcaaagaagaatcaaacccgtaataatccattaagaaatcagccacccgattgttcttgaaatcccagaacataccttccgaaagtccggaaacagttgtgcagatttctccactcaacttcatggcaatataatcgcccggcagcattatcttatcaatctgctcatagatggtaggttcgttttctttaatccacgccaacttggaagcggtaaaatttcccggtgagttcaacaaatgagaaagacatttctcctccccgattgtctcaaacgctttctgaccgtatggcaccgcacgagagtcacaccagatgatagcaggacgcaatacatgctgattcttatcaacacaaaccaatccgtgcatctgataagagataccgatggctttaatttcagcggcactcactccggattcggtcataatagcctgcgtggacaactttaagttttcccaccaactttcaggatcttgttccgcccatccgggattcactgcaataatattcgcttctgttttcggaaaaaatgccgaggatacacatttaccagtctccgcatttaccaaactcgcttttacagacgagctacctatgtcataacctaatagaaacataattttatttacgattaaacgatttactatttacgatttaacgctcaatgcccgactattaatactttaacattcaacgcctaatacttaatatctaatacttgatacttaatacttgaataaagtctaccttctcaccttattatatatcttcttatcaaatttataataacgggcagcacggtgagccactccttgttgtttttcttccaaaggaactacatattccatcattgctatttttttatggaagttacgcacgtccacggctttgtcgtatactaattcaaaaagagtccttaattgtgcggctgtaaatttacgcggaagtagttcgaacaacatggaaggattaaattctacgaactgacgaatataagtcattgcctcctttataatcagattatggtcgaaagccagtgttttcacgtctttcaaagcgacccagcaagcctggtgatcgtccagattcttatccaacgtacggtctatcttcaccatcgacaaatatgcaatggtaacaatacgctccacttttgactgcatagctctttccaaccaacgtacatctttcggattactcgttctgtttttagaaccaaatgctttaaactgcatcagattcacatttttaagtcctgtcagttcatacaaaactcgttgtgcagcttcatccagggcttcatccatatagataagacttccgggaagtttcatatcatgatatacttctccattatcctcacctgcacgttttacaagcaacactttcagttgttctccgtcaaaaccaatcactacacagtctactgatatatgattgtttgctagaggtgtatttttctgtaaattttgcatatacatttctttaagacgatgcaaatatagaggctacaaaccatcaaaacaaaataagaaacatgctataaaacattgtttttcatataaatacatatcatacattctacaatatgaatagttagtgttatcttacgaattacaatatgtattttagtatttccacgggtgagtaattgtataaagtacaaaaactagatggacgctttattatcagtacttttcatatcttttccaacagatacccggaaaggtacttattgtattttaaacgatatgtcattttgtaccttatcgttttttatcctatctttgtcgggtaaatattaaaaaatctaaaatggaacgtcatccagtcattttatccattgccggctccgattgttcgggaggggcaggtattcaggcagacataaaaacaatctcggctttaggaggctatgcagcatcggccatcactgccatcaccgtacaaaacacactgggggtacgcgccgtacagtctatctctccggatatggttcgtgggcaaatagaagccgtgatggacgacctgcaaccggttgccatcaaaataggaatgataaatgacattcagatcgttcgtgtaatttccgactgtctacaaaaatattcgcctgcatacgtcgtttacgatccggtaatggtatctaccagcggaaagaaacttatgacagatgaagcgatagaagaaatcaaaaaagaacttttgccacttgtgacattaatcactcccaacatcgacgaagcaaaggtgcttacaggtaaaagtattcacaatattcaggacatgcaggctgctgccaaaatgctgacggatgattatcagactaatatcttactaaaaggcggacatctggaaggagacaatatgtgcgaccttttgcatacgtccgaatttatctaccatatatatgaggagaaaaaaatagaaagccataatctgcatggaacgggatgtaccctctcttccgctattgccacctatcttgccaaaggctatcccatgcgagaatccatccagcatgcgaaaacatatatcactcaagccattatcgcaggaaaagaattgaatatcggccatggtaacggccctttatggcattttccggacaccgttgcacaaatgtgtactttttgtgcggttgtatcataaaaatacgtaactttgcacccgcaattaaaaatcaattaaataataaaaatatgaaagcatttgtatttcccggtcaaggcgctcaatttgtaggaatgggtaaagacctgtatgaaaactcagctttagcaaaagaattgtttgaaaaagcaaatgatatcctcggatatcgcattacagatatcatgttcgacggcacagacgaagatcttcgtcagacaaaggttactcaacctgccgttttccttcattctgttatttctgctctttgcatgggcgacgacttcaaaccggaaatgactgccggccactcacttggtgagttctctgcattggttgctgccggtgcattgagttttgaagatggtttgaaacttgtttatgcacgtgcaatggctatgcagaaagcttgtgaagctactccttctactatggctgccattatcgcattgccggatgagaaagtagaagaaatctgcgcaacagtaaatgcagaaggtgaagtttgcgtaccggccaactacaactgcccaggacaaatcgttatctccggctctgtaccgggtatcgaaaaggcttgcgaactgatgaaagctgccggagcaaaacgtgctcttccgctgaaagtgggtggtgctttccattctccattgatggatcctgctaaaatagaactggaagctgctatcaaagctacagaaatacatactcctaaatgtccggtatatcagaatgtggatgcacttcctcacactgaccctgcagaaatcaaaaagaacctggttgctcaattgactgcttctgtacgttggacacaatcagtaaagaatatggttgctgacggtgctactgattttacagaatgtggcccgggtgcagtacttcaaggattgattaagaagattgacggtactgtcaatgctcacggtattgcataaatatccgtaagacagacttcatctttaaatgatatagagcgtgttggtaactattgccaacacgctttttttatatgaaaaccatagatgaaatacaaacgaacatgttgtaaaacaccctgatacttttcttttccggcaaactttccgaatctttcttttgtttttattacaggaatcatttactcaaatttatgagccatgaaaatacatgaatatcaagcgaaagagattttctccaagtacggaatacctgtcgagaggcacactttatgccgtactgccgcaggcgtcctggctgcataccggaggatgggaacagacagagtggttataaaagcacaagtattaaccggaggccggggaaaagccggaggagtgaaactggtaaacaatacggaagatgcttatcaggaagccaagaacattcttggaatgagcattaaaggtcttccagtcaatcaagttctggtcagcgaagcggttgatattgctgcagaatattatgtcagttacaccatcgaccggaatacacgttctgtcgttctgatgatgagtgcgtccggcggtatggatatcgaagaggtagcccgtcaaacaccggagaaaatcatccgatattcaatcaatccatttattggtcttcccgattatctggcaaggcgttttgctttctctctttttccccaaatggaacaggcgggtaaaatggctgccatccttcaggaactttataaaatctttgtggagaatgacgcgtcgttagtggaagtaaatccgctggcacttacaaagaaaggtacgttaatggctattgacgcaaagattgtttttgatgacaatgcgctctatcgccatccggaggtacatgctttatttgatccgacggaagaagaaaaagtggaagcagatgccaaagataaaggattcagttatgtccacatggacggcaatatcggttgtatggtaaatggcgccggacttgccatggctactatggacatgattaaactttatggaggtcagccagctaattttctcgacatcggtggcagctccaatcttgtcaaggttattgaagctatgaaactcttattgcaggatgagaaagtaaaagtggtcctgattaatattttcggtgggatcactcgttgcgatgatgtggcaatggggctccttcaggcattcgagcagataaacagcaatgtccccgtcatcgtccggcttacaggcaccaatgaacatatcggacgggaactgttacggaattacagccgtttccaaatagccacaacgatgaaagaggctgctcttatggctctgaaagcataatacgtaccaaatcactaaaaaataaagcaattatgagcatactaatagataaatccacccgtttaattgtgcaaggaatcactggcagagacgggcttttccatgccaagaagatgaaagaatatggaaccaatgtggtcggaggtacttctccgggcaaaggaggaacagatgtggacggaatccccgtattcaacaccatgtatgatgctgtcgagcagacaaaggctaatacctccatcattttcgttccggcacgttttgcggcagatgctattatggaggcagcggacgcaggcatccgtatcatagtctgcattgcagaaggaatccccacactggacgtgattaaggcacatcagtttgccgaacaaaaaggcgccatgttgatcgggcctaactgtccgggactgatctctccgggaaaaagtatggttggtattttaccgggacaggtctttttagaagggaatgtcggagttatcagtcgtagcggaacacttacttacgagattgtgtatcacttaacggcgaatggcatgggacaatccactgctatcggcatcgggggtgaccctgttgtaggtcttcatttccgtcaactgctggagatgtttcaaaatgatccggaaacagaagcaatcgttctgattggagagattggaggaaatgccgaagagcaagcggccgaatatatccgcaataatgtaaccaaacctgtggtagcatttattgccgggcaatcagctcctccgggaaagcagatgggacatgcaggagctatcatttcgggaagttccggttcggcaaaagagaagattaaatctttagaagctgccggtatccgggtagcacaagaaccttcggatataccgaaattattgaaaagataaactcccaaagagaaagaaaagacaaaagtagtcatatcataacagatgcagattcactccctcaaataagtaattacatacttatcgtttagagtaaatctgcatttattttacatacctttctttatacctaattttataagaagagcattcataggatatgcacagaagaagccgaaaagcatagccaactgcatcataaaccagaatatccatgtgtctttgggtaacggttcattgatgaacaatacaaaatagacaatcgccatccagccatacattcctacctgccaggacaaaagagaaaagaaatccgctttgaaagcacgagccaaggcattacctaccgatattttttccatctcccgaatagcatagaattggaaataaacaccaatcatcaaagccagaataaagtcaagtacccaattaccaaagagctgacttcctgccacagttacaggaacatagtttgtaaaccactctcctatgatatctgccaatgtacatcctgcaccacaatgaagcgccgacaaagctaccgattgccaataaggacgttgcattccttgcatcgacatttctccctgcatggccatatccatctccatattatctttcataccggacatatccattcccttcatatcagacatatctttcatgccagacatatccattttcatcccatcatcctcagctttcatcggactactccgtccaaacttattatacgcccataaagctaaataacttccccataatgcagataatatccagactgcattcattatcttcattgattgcggacgatgtgtcaggtctatggcaatatgtactgcaattccgatacctgaacatactaagaaaacggctattaaattgagcatggctgtatgttttttaaagattcagattacaaaacatcctttatttgtgaatagttcaccccattacttttaattttatcccgtcgaactattccccacacgagttgttatcattttataatcaaaacaatagaattatgagcagacgtagacaattagagcatgaagtatctgttgctcaagaaagaataaagaaagctgcaaaagatacaccgaaggatatcctgaaattatgggaacaagagctggtagacctggaattggaactcaataatatggtggatgatgaagaagataacaatgaggattaacagaagaaagaaggtgtgtcaaaatgcacaccttctgttttttacgcacaaagccccgactttcacaagctggggctttgttattacctaaagattttgtatctttaggcataagaatttcactatgacaaagatacattttcgtccttacaatcccaaccaaaccgttctttttcctcaaagaattgatgaggatattgcagaaaacgatccggtgcgcatggttgacgccctggttgagggcttgaatcttgaaagtttcagaaagctgtataaggaatgcgggcgcagcccttaccaccccaggatgatgctcaaggtcattctgtatgcctatatgaacaacatctactcctgccggaaaattgaaaagctccttcaccgtgacatccattatatctggctggccggatatgagaaaccggatttcattaccatcaaccgtttccgcaaccgggtgaagaaggaaatcaacgaggtgtttacgcaaaccgtagttcttctctcttccaaaggcttcatcagcctgaatgtggaatacattgacgggacaaagatcgaatccaaagccaacaagtacactttcgtctggcgaaaaacggttgagcggaaccgtgaacgcctgatgaagaagatacatgtcctgttagggcagatagacgatgtcattgcccgggagaagtcatcagagaacaatgaggaggttgggttcactccggccatgctgactgaaatggcaggagaattgcgtcatgcactggaacaggtttccgagccatccgcgaaagaggaaaagactgaactgaaaaagaaacgcaaacagttgaaggaactggaagaacacagggacaaactgcaggaatacgactgccatctggaaacgctgcaagagaggaattcctattccaagacggacaaggacgctacttttatgagaatgaaggaggatgccatgcgcaacggacagacgaagcccggttacaaccttcaaatcggcaccgaaaatcagttcatcaccgattttgcactcttcccgaaccctacggatacactgaccctgattcctttcctgcaatctttttcaaacaggtatgaccggatggcccatacggtggttgctgattccggctatggctccgaagagaattaccgcttcatgtccgaaaacggcatggaagcctacgtaaagtacaactatttccacatggagcagcggccgagattcaaaccggacccgttcaaggccgaaaacttctactacaatgaagaacatgacttctgcatctgccctatggggcaaaggatgcggaggataggcaccaggaatgtgaaaaccgcatccggatatgtcaacgaaaatgcacggtacagagctgtcaggtgtgaaggctgtcccctgcgatgccgctgttttaaagcaaaaggaaacaggacgatagaactgaatcataggcttagacaatacaagcggagagccaaagaactgctctgctctgagaaaggactgaaacacagagggcagagatgcatagaaccggaagccgtgttcggacaaattaaaaacaatatgaactacaaacgtttccgacattttggaaaggacaaggtcttcatggactttgccttcctagccattgccttcaatataaaaaagatgtgtgcaaaactgacaaaaaagggtatgaactggctgattagactgttttatgagcttacaactgctgtttttagatgctgggaacacataaatcaaagaaatcttcaaaagatcgcagcttaaagaaagtgaacagatttgtatagtgatgaacaaaaaaagaggtgcatcgtgcattacgacacacctcctttctctattactgtatatgtattcagtattaattctttggcaatgcttcttttactaccattgaacgacctacatattctgcaccgttcaattgttcgatagctttagcagcttctgcatcatccggcatttcgataaacgcaaaaccttttgatcttctagtttcacgatctgtgattaactttactgaagcaactgttccatactcttccattacatgtctcaaatctgattccttaacattatagctaagatttccaatgtacaaattcataaaatacaaatataaaaaattaataattcaataagaaagttttaggaagatcttaattagagatggatatgctcaaataaatgagaagattcatgtaaaaaaatcaaatcgtaataaacctctttattgttgttggtacaaaggaaagcattatttggggatattgcactatattctctcctttttctttctgcaaaacatcttttttatgaaaataggccaatacttaacgttcttattctttttataccaagccattccatgtaaactaccggattagtctttctgcaaattcttcgctacaaattcctcaaaaaacgttttcttatagtttccacctcctattcctatctcataagacttaataaaaatatcattggtatcaaaagagtcaatccgtgaagtattgacaatataggacttgtttatccggagaaactgtttagcgggcagttgctcatgaatatttttcagattcatcttagtaatcacccgctgaccttccaattggagaatggaataatcctttagtccttcaataaaaagaatatcactgaagtttatcttgatatagcgtcgttccgatttgatgaagatatattcttcctgtatctcctccactctttcggctgtttccgacaataacagtttatgatatactattgccttattgactgctttcagaaaacggttcatttcaatgggcttcaccagataatcaatggcacttacttcataactatcgagtgcatattccgcatacgccgttgtaaagacaatcaacgtattcacgggaatgctttgcgcaaattctattccggtaattcccggcatctgaatatcaaggaaaatcagatcaaccgtatattcatttatataagcagacgctgcgatagcattattaaagctacccaccaatgtcagttgtggaatctgctccaccaatgacttcatacctttgcgagctaccggctcgtcatcaacaataatacaattcataagtttagatgtaagttgacattataagttgtttctttatcttctatctgtagcgtataccgtgattcataaagtaaatccagtctgcgtttcacattggccaaccctattcccccttcccgcttaacaggaacacggggcttagaattttcgcaacgaaacgtcaactgtttattatgcacagaaaaatacaagtgaacataagataaattgtcgctatccaaattatgtttcaccgcattctctacaaaagggataaacaataacggaggaatacagatattctccatatttccctcttgaaagattgtatattcaaaatgatcccttctcaccttctccaattcaagaaagctggtgagaaactgtatatctgcagtaagaaatacttctcttcttgtactgtcattcaactggtagcgaagtagattgtccagtttctccaatatctgtgaagcctcatccggagcatcctttaccaaaatattggcattattcagcatattaaaaagaaaatgcggattgatctgtttctttaattgttgcaattctgtctgtttagtcgccttctccaattcaagaatctttttatcggagacaacccaacggcggaatagttcaaagctcgtacagccacctacacttaatagcagtactaatactccataagcaatactatcaaaagaaacagcgtggttatcctgtatacaaaacccacgaataccgtatcgttgatataatggagacagaaatataaatcctaataatacactcactaaattgactccgagaaacgaaatccaataacaccataacttgcgcttggccttatacaggaaacggggcactaaccaatatatattcagatagataggaaatgcaaaaaccaatatactaaccggatatgcatataggaaaccttctctagtaaaatctccatatacattctgaaagcccaaaaagagtataataaatagcaatagtaaattactgataagcctgaaacggtcatttaccagattcttcccccaatcgtatacattccaggtatctttcataattccaacattaaaccaatggtacacagtgcctcatcattatagccactttttaattgataacctcccggatataacaagtccaatcgttgccgtaacttgtcaaaagcaggtgctacttgcagactttccttttttcgcagacagtatgtacaaataaatcgaagctgattctcttccatttgaaaatcgatccttatattttctccctttccattctctccacatacagttgtctgaatcacatattctatcacaggcataaacaataaaggaggaacttgtatataacgcacttcattcaggatgttgacttcaaaattaaactccggattacatagtttctccaacttcatataatcagtcataaaatcgatatcatctcccaacaatacctgttgccgttcactttcataaagttggtatctaagcaaccgacttaatttaaagataagcaatgacgccttttctccatcttctcccagcaaggttcgtaccttattcaatattctcgaaaaaaactccggttggagttgatctttcaaatgatttagatcagtctgtatgctaatattctccaattcatttaatcgttgttgataggccacccaacgatgcagaaaaatagtaaaagaaaaagccaggaaatagagtatcagtgccaatgcatttatcaacagaaagaaagggagatcactgtttagtctttgcatctgttcgggtataacataatattgccctagaaaacaaatagcaccaaccatggcggtcagcataaatccaacaaggcaactcaaatatatgatatactttttatatctacgctgaaacagataaccgggaattaaccagtaagtatgcagatttatgattccccatagaatgacagaaagtaaaagactaactcccgtagaaagatttagccctaaactatcgctttcgacaaaagtgcctctgaacactaaaaaggagactacaagaaatatcccaatttgcttcagtaacgtatataatagtatcttaactgacatcaggcgataaagttaccatttttttagaacttatacttcattcccaccgaaacatacattgccggtttaaaatatggatcagtatctttagacatatcttcgaagaaagcctttaaagtgcgggtagtgtaataagctattctgctacacgacacaccggcagtagcagtgattgaaaaagaattccccatacttacttccggttgtaaacctacaataatgaattgctgggaaaacatagtatcttttccttctctttccaacaatgccaatgacccgttcatctctgccacgatccttagattcagatatttattcattttcattcctgccgatacttccatggcattcagcatcgaaactttaatttgataacgtccttcagtgctccaatcaaaataaatagcaggaaataccatcggataaccaaatgtgttgttcacagccaatccggctccaagagataaattggacttgaactgccggatgaaaataactcctccctgtcccagaacattcttcagttttacatcagaagaggtatagacgcctgcaccgacagtcgtcaacaaaagccattttttgctgatagggcgaatattggttacgctcaactgcatatttataatttgatctatgtctatgtaagattgaagattcttattattcattgccgtatagcttcctcctgccgaaatcatccaaagagttggctgatttctttcattcattttctgtgatacgggaatattgacgttcccttccacaaagcacatatcccctttcccgggatactgtccgttttcatctttatatcgggaagaagatatatacccggttttcacagtaacctgtgcctgtatattttcaggaagtaatagaaacaaggcgaacgcacttaacaaaataatcctcattcttttatcagttttagggtttgaatgagacaaaagtagagttttaccgatctgcgtagagagtttgtagaccaaacccggcattaagtagaccaaacctgtaaatttgtagcctgtttggtctgaatgtattatataaaaaaataaaagactacctttcaaccgaagatagtcttttattcatatatcattttttaattatccacaatggaaatacttatgtacgagatctaacatctccatcggctttccttccaaatccgcacgcaatgttttatcttcataaccacgaagtctgcggatgataccgtcaatcattgccgggctgaatacattatattgttcaaagattgcccgttgttgttgcagacaatcggcagaagcttcacagctatccggcagttgcgccagtgatttcagcttatcttcgttttctttctgatggatattcacatttacataagttttttcagcaatgtccagcgcattttcaatctcaaaaccatgacggcaggcaacagccaaaccagccaacagttgatacaaatctgccgaaccatccggagagcgcatttctacagtctgcttctgactggtgtcaaaatgactttcagcttccaacggatttgccaatgtacacatatctgtttttgcagcccatcccagaggtacacgcaccaatacggaacggttgcgatctccccagcaaacgttggtaggtgcttcctgatgaggaacgagacggaaataagaagtaggattggtatttccgaaggcagtaattgacggagcaagcaccatcattccggcaattgccttgcgtgctgtttccgacaaaacaccgtctttcagcatctggttctttccgtctttcatgatacgcatgtggatatgcaagcccgaacctgctttacctgcggtaatctttggagcaaaagttacattgtatccatatctaaatcccaggttacgaatcacccatttggcaatcattaattgatctgctgcctgcgatacgggaaccggcaggaattctatttcattctgctcatagatataaccatccagcgtaaaattacctacttcggagtgtccatactttatttgtccgcctgtctgtgcgatgtaagacatacattgggtacggaattcattgaatttagcataagggcccgattcatgataaccacgttgatcggttgcctggaacataccggtgtccggagctattacataatattccaattcgcccattgcctgaaattccattccggtaacttctgtaaaagtcttgcttgctttgtaaagagtgtgttctggtgcactttcgaggggttcgccgtctttattgaagaaagagcacagcatagacagcgtcggaatctcggcaaacggatcaacgaatgctgtgcaaaaacggggaattacataaaggtcactactgcccgcttctataaatgagaaaagactggaaccgtctacccgttctccacatgtgagaatagcttccagataagcttgattgttgatgacaaagttcagagttttcaaacgcccgtctcccgccggatacataaaattaaccatgcggatatctttttgctggataaatgagataatgtcagcttttgtaaactctgaagttggtttttgaaggaatgccaccaactgattagcattcattgataaatcataattcataatcggttgtttttcgttgttgtatgattaaaacggtttgttgaatgccaaagataaggaaaagatggaaaatcaagtaagaaaagatttaattatttctctgttatgctgcatttacgtctattatcctatttaaaacgcttcaggtctttcttctcaaaaatccattccggagtgtatagtttccctgcatccgtttccgtcagctcgtaccagggagaaaggttgcggctggttggattgaccaggatatgaatctgttgggcaggcatatagctttgtgccaggagaaatactttcttcccggtattcggatgaatggcaacatccataacaatcacagcatgaccgggtgaaccacctttaataaagacatccccgggttgcaaggaagtataaagcacagttgggagttcacgagataaagaggcagttccggcatacataaaaaccatatcgagatagttacggaaagttttataggaataatccactcccttgcccgaagcataccattgaacctgattaccgttgacttttattcgatttccctccgcccatttcttatattcggcagtaaatccacttgtgaagttgaattttatatctgcataccgtttatgtttccacagatattccgcccgcaagcgtatcactgcatcggcacactgttgcaaatcgcggttgcctatctccatatctacaactgcaaatgcggctgcctgattggctttttcttttccattgtaaagtaacactttactgcctttaggcaataatggcaaattgcgcaaataagttgtaaacgaattatcggagcaggtctctctaacatatcctgacggaggagcgattctatccgcaagcctctcctgtccccatgagtgaaagactatgagaagcaagcctgcacatattaacaaatacttcatatcggtttttcttattccatatccggacaaatataagtaattattatggaaaacgaagttgaatgtctgtttttctcccgattgaagacgctatcgtcttaaaaatatgtaatatcggattctgactaaaacaaagtggcctatactctcttttttctgtaagaatagtgcgaactttgttttctacaaattataatagtgtttttatggaacaggtggtagatttagctttaccagaatactttgaaagaatatccgcagaagctacctttcaggagcgattgtccgtcatagatatagataactcccgtcgttcgccggttcaagtcaaaaactatccgatacgcttaaaaggctattccctcatctttgttctttccggagaaattacaataggaataaactatttatcgcatacactgaaaaagaacacggtgatgcaggtgtatccagatgatattatagagcacacagcttattcagccgatttcaagggctatctcatcattcattctgctgaattgaaaaaggaaataatggctatgacatccggcatccgtctgcaacaggcgggtcagttgaagaaattacataccaggcaagagttgagtgaggaagaaagcctgcgtttgagaaaacaggttgaactcattaaaagttatattcctgataaagaacacgtctaccactcttatgtcatcaagaatcagattataaatctattctttgaccttgataactgccgctggcataggtatggcgacggagaacggcaccaatagtatcttccaccgggatgtgcggattgatacgtgctggctgatagaggtcaacataatctgtgcctaatcgtttcaaggtgtaagccagataattttgtacgttctgcggacggacgtcaataccatagaaccgatcatctggagtgagcattccaccaaacttgacggcgataaaaatgtcttcgcgcttccgggttttcaaagcctcgcggatcaccagttcactttctccgtgaccataaaagtcccccgtgttcagatacgtaattccactgtccagcgcggcatgtatcgtgtcgactccctgctgaacgtcagccattctcatggcacccagtccgatacgtgaaagggtgataccattggtttctttattcaaatacttcattgtttcttttattatatagtactaattcgattgcaaatttcggataaattccttcatgataccagagcaatatccgttcatttttggtcattatccgtcaagaagcctctttctcatgaaatgtctcaaacatactgattataaaaaccaattgactgcctcaactgttttatttgaatagaactattaaaactaccgtcacatgaaaaaggatattctaaaagacctgctggcaaagcccggaaagaaacatttggtatcggattttgactcgtcattcactggcaatttatccaaacaagacgctaaagagcaactggcaaaggatattgagaagctttcggagctgcaaagtatgctttatgcacaagaccggtattcaatcctaattatctttcaggcgatggatgctgcaggaaaagacgggactatcaagcatgtgatgtccggcattaacccacagggatgccaggtgtattcgttcaaacaaccgtctgctgaagaactggaccatgattatctctggcgtatcaatcgctctctcccggaaagaggacgaatcggcattttcaaccgttcgcactacgaagatgtgctgattgccaaagtgcatccggaaattattctatccaacaagttaccaggtgtcgaaaccataaatgacattgatcccgacttctggaagcgtcgttatcgacagatcaacgattttgaacgctatctgacggagaatggaacgattgtcctgaaattctttctcaatgtatcgaaagccgaacagaaaaatcgattcatggagcgactggacgatgcatctaaaaactggaaattctcttcggcggacatcaaagagcgtcaattctgggaggactatatgaatgcttatgccgatgtactgacggagacatcaacggaactggctccatggtatgtaatccctgccgataataaatggttcatgcgttacgcagtaggacgaattatttgtgaccggatgcagcaattggatttacattaccccaaactgtcgaaagagggattggagaggctggaagagtgtaagaaaagtgtatcaaacattaacttttaaatcacttgcgcttatccttttttattctaactttgtagaaagacctacataaagaaccaaaattgataagcttatggacatccaaacttttattcaaaatttcagagaggcattcggaaaaaatgctgaattgcctcttgtcttctggtactcggacgaacaaaaaggagaaacagaaaagataaacggttgcttcttcaaaggtatgagaacggtaagagatggtggtattatcagcctgaatgccgaaaacatcggttgtggcggcggtaaattctatactggcttcaccgaaatgccagaacgtgtaccgactttcgtttcgctcaaagagaaatacaaacagactcctgaaatggtcatcgactttatacagcaaatcggagttccccgaacagaaaacaagtatcttcattttgcacgtatagataaggtagaaagccttgaagaaatagaaggtgtcgtatttctggcaaatccggatatgctttcgggcttgaccacttgggctttttatgataataacgcagcagattgcgtcgtttctacctttggttccggctgtagtgctgtagtgacgcaagccacgatagagaatcgtaaaggaggcaaacgcactttcctcggtttcttcgacccatcggttcgccctcatttcgaagcagacaaactaagctataccatacctatgtccagatttaaagagatgtatgagacgatgcgccaaagttgtctattcgatacgcatgcatggggaaagattaaagaaagaatgaacggataatctcccataacgaaattgcatattattatacaattatcgggacattaggtatgcttattccgaacatacaaggcttctctttcgttgttataggaagaaactgccacttgatactgacaattcattatcaagacagatattttctgaatatcaatccctgcctgtcctattttgtttcccagtgtggaacttatagtttcacgctttgaaaccatcagtttcacaccgagaaaccattagtttcatgccgggaaactaaaagtttcaagcgcctgaaactttcttttcctacaggattaaaataatatatcagtcggattaaaccttttatctggagaaaagtcttattattaatatattatcgttctattcaacattaaagtatcaacgaaaatggaaacatccgtcaaactctattcgctgaaacacagcaatgtgaaaacctacctgttcgccttactattcgtagcgggtaacattgcacttccacaattatgccatcttgtaccttatggtggtcctaccctgttacctatttattttttcacgctgattgcggcttataaatatggttttcttgtaggattattgactgctattctttcaccagtcatcaatcatttattgtttgccatgccctcggaagcggtacttcccatcctattaatcaaatcgtccttactcgccggagcttcagctcttgcagcacgtactataaaatcggtttcattactggccattcttggtgtcgtactcacttatcaggtcataggcgttgcatttgaatgggccatcgtcggaagtttctacgaagcagtacaggacttccgtatcggtattccgggaatgttactgcaatggttcggcggatacgccctcctgaaagcaattgccaaactctaaactaatatagaaagatggacagaagggattttttaaaaacagtagctatcaccggagccgccttgactatacagcgttcggaggctatggaggtgttaactcaaacaatcaataaagcaaacggaagcaatcctgatctggtggccgttatgggcggagaacccgaagagatgttccgccgtgccataagcgaactggggggtatgaagcaattcgtgaaaccgggacagaaagtggttgtaaaacctaatatcggttgggataaagtgccggaactggcaggaaatacgaatccgaaactgattgaagaaatcgtcagacaatgttttgccgccggagctaaagaagtggtcgtgttcgaccatacttgtgacgattggcagaaatgctacaaaaacagtggtattgaagctgctgccaaaaaagccggagccaaagtaatgcctgcacatctggagtcgtattacaaaccaattgatctgccaaaaggcaaaaagatgaagaaagccaaagtgcacgaagcgattctggattgtgatgtatggatcaatgttcctattctgaagaatcacggaggtgccaatctgactatctccatgaaaaaccacatggggattgtgtgggatcgcggattcttccaccagaacgatttgcaacaatgcatcgcagatatctgtacattacagaagaaagctgtactcaacgtagtagacgcctaccggatcatgaaaacaaacggtccccggggacgctctgcatccgatgttgtactggcaaaaggattgtttatctcaccggatattgtagccgtggatacggctgctgccaagttcttcaatcaagtacgtgagatgccactggatacagtaggacatctcgccaatggggaagcattgaaaataggaaccatgaacattgacaaattgaatgtcaagcgaattaagatgtaaaacaaccatgttaagaaggctacgtattggaatatcagcacttttatttgtgctgatttctttcttttttctcgatttcgcagaaatattaccgaacagttttcatcggctggcacatttacaatttattccagccatcctttcactaagtataggtatcttattatttctcattgtgttaacgcttttattcgggcgtgtatattgttctacaatctgccctatgggtatcttgcaggatgtgattgcgcgaatttccaaagcaacgggaaaaaagaaaaaaagatatagttacagtcctgcaaaaaacaaattgcgctggggtgtgctcggactgacagtggtcgggtttctatgtggatttacatttattgttggtttgctcgatccgtacagtgcgtatggacgtgtagtagtgcacatattcaaacctatctatatgctggggaataatctgctggaatcactctttgccagatttgacaattatacattttatcaggtagacacctccatcttgagcatttcttcccttctcatcgctattattactcttgcagtcatctttgtaatggcatggaaacatggacggacatggtgcaatacgatttgtcccgtaggaacaatattggggttattgagccgattttcattattcaaagtccgtattgatactgccaaatgtaatggatgcgggctttgtgccaccaaatgcaaagcagcttgcatcaatagtaaagaacacgctattgattatagtcgttgtgtagattgtttcaactgtttgggagtatgcaaacaaaaagcattagtttacgccccttctttaaaaaaacagtctgatgtagaaacttctgcaccatcatcaccggatttggattcatccaaacgccgttttttggttgccggtcttgttactgccggagcaacccccaaactcatctcccaagccaaagaatctgtagcaagcttggaaggtaagaaggcatacaaaaaggaaaatccgatcactcctccggggtctatcagtcgggaacacttccaacagcaatgcacatcctgtcatctttgtgtcagcaaatgcccttctcatatcttgaaaccggcttttatggaatatggcttggcaggcatgatgcaacctactgttagctttgagaaaggattttgtaactttgactgtactgtctgtggagatgtctgtcccaatggagcaattcttcccataagtgtagagcaaaaacatcttacacaaatgggatatgttgttttcatcgaggaaaattgcattgtttatacagatggaaccagttgcggagcctgctccgaacactgtcccacacaagcagtagcgatggtgccgtataaggacggattgacgattcctcatgtaaataaagaaatatgtgtaggttgtggaggatgtgaatatgtttgcccagcccgtccattccgtgccatctatatcgaaggaaatcccgtacaaaaagaagcaaaaccattcaaagaaagcgaagagcacaaagttgagatagacgatttcggattctgaccggcatggtgccggagcagagtttccatccgtgttttatgttctatgacggtttatttcaaatgtaaacaagacagatggtatggatttaaaaaaaactatccattatattcctcctactttcaataaattcactaaattcgtggcgaactaaagaaagcaattcatggaggtattcacaaataactggaatagccggaaatatcagattggctatgcactaagcggaggatttattaaaggatttgcccatttgggagtcatgcaagctcttttggaacatgatattaaaccggaaatcatctctggagtaagtgcaggggcacttgcaggtgtcttttacgcggacggcaacgagccgcacaaagtacttgattatttctccggacataaattccaggatttaaccaaactggtgattcccaagaagggactatttgacctctgtgaatttattgattttctccggactaacttaaaagcaaaaaatctggaagagctacaacttcccctgattatcacagcaactgacctcgatcacggtcgcatggttcactttcatcggggaagcatagcggaacgggtcgccgcttcctgctgtatgcctgtcatgttttctccggtcaacatagacggcactaactatgtggatggaggattgatgatgaatcttccggtctctaccctgcgcagggtttgcaataaagtggtagctgtcaacgtaagtcccatcatggcacaggattacaaaatgaatattgtaagcattgctatgcgctcattccatttcatgttccgcgccaatacctttcccgaaagagaaaaatgcgatttattaatcgaaccatacaacctatacgggtacagtaacaccgaactggaaaaagctgaagaaatcttcgggcaaggctataatacagctaacgaagtacttagtcaactgttggaagaaaaggggaaaatatggaaataatctcctatccatcagaaacaagaatgaatacgaatattaataatctactctatatgaatgacgaaaataaaataattatctaccaagtattcacccgcctgtttggaaataacaacaaccactgtgtctacaatggagacattgccaccaatggttgcggaaaaatggctgatttcacgctcaaagcacttggtgaaatcaagaaattaggtgctacacatatatggtatacaggcatcatcgagcatgccactcaaacggactatcgccgttataatatcagtccggatcatcctgctattgtgaaaggaaaagcaggttctccctatgctatcaaggattattatgatgtagatcctgacttggctaacgacgtgcaaggacgtatgaaagaatttgagaatctggtacatcgcacacatcgcacaggtctgaaagtaattattgattttatacctaatcacgtagcacgccaatatcactcggatgcacaaccggacggtacgaccgaattgggagctaacgatgactccagccaatctttcagcccatataataatttctattatattccgcaagcggaactccatgcccagtttgatatgaaagacggtgcagcagagccttaccgggaattcccggcgaaagctaccggtaacaatcgttttgatgctactcccaatatcaccgactggtatgaaacagtgaaattaaactatggagtggattatcagaatggcggtacctgccacttctccccgactccggatacttggataaagatgctggacattcttcttttctgggcatcaaaagacattgacggtttccgctgcgacatggccgaaatggttcctgttgaattctgggaatgggctattcctcaagtaaaagaggcttatcctgaaatacttttcatcgcagaggtttacaatccaggtgaataccgtaactatctgttccgcggcaagtttgattacctgtatgataaggtagggctgtatgacacgttacgcaatgtagcttgtggatatgaatctgcatccgctatcactcattgctggcaaagtctgaatggaatagagaaaaagatgctcaacttcctggagaatcacgacgagcaacgtatcgcttctgatttctttgccggcaacccgcgtaaaggaattcccgcactgatcgtttccgcctgtatgaacactaatcctatgatgatctacttcggtcaggagtttggagaactgggcatggatagtgaaggatttagcggaagggacggacggactactatattcgattattggagtgtagacagcatacgacgctggcgcaacggaggtaaatttgacgggaagatgcttactgaagagcataaacacctctactctatctaccaaaaagtactgacgatttgtaatgaagagcaggcaatcagcaagggagtattctttgatttaatgtatgccaatataaacggatggcgtttcaatgagcataaacaatatacttttatgcgaaaatataaaaatgagattctgtttttcattattaatttcgacagtcaactggtagatgttgctatcaatatgccttcacatgctttcgactttttacagattcctcaaatggaatcttatcaggccactgatttgatgacgggcgctaaagaagaaatcagtctattaccttataaacccacggatgtttcggtaggaggctataacggaaagattttaaagattactttttaaataaaaagactaagatctgtatactcttcatccctcggtcacttatgaatgaccgggggattattttatgcacatcactcaaacaaatattctcaaaggctgtttaggtagataaataatcctctaaactcaaagcttatgaagaaatttatgatttgtgcaatcgcattgtttctgctattatctacatctgtctttggagatacccctcccggcaatgtacagtcgactttcaagaaaatgtatcctaaagcaaatggcgtcgcctggtcacaagacgacggatattattgtgccaactttgcaatgaacggatttactaaaaatgtatggttcaacgttcggggacaatgggtgatgacgcagactgatcttgtcagtctcgaccggctgaccccaacagtctataatgcctttgtatccggcccatacgcaaattgggtggtagataatgtgacaatggtggagtttcccaaatggcaggctattatagtaattaaggtagggcaagataatgtcgacatcaaatatcagttattctatactccacaaggggtattgctcaaaacgcgcaacgttagtgatatgtatgatattctcgggccaagtacctttctggaaaactaggaactgaattatataatagggtaataaacgagaaagaggttgtgtcaaaacgctgacacagcctttttttatgcgcaaagcccagactttctcaagcccgggctttgttattacccaaagttttcgtatctttaggtataaagtttttcgttatggcaaagttacattttcgtccttacattcccaaccaaaccgttctttttccacaaagaattgatgaaaacatagctgcgaccgacccggtccgcatcgtgaatgctgttattgacaatctcaatcttgagagtttcaagaagctttataaggaaacgggccgttgtccttatcatcctaaaatgatgcttaaggtgataatctacgcctacatgaataatatctattcttgccgtaaaatagagaagcacctccttcgtgacattcattatatttggcttgccggtaatgagcatccggattttatcacgatcaaccgttttcgtaaccgtgtaaaggaggaaataaataatgtatttacccagttggttcttgtccttgccgataaaggtttcatcagccttgatgtggagtatatcgacggcaccaagattgaatccaaagccaacaaatatacttttgtctggcgcaagacagtcgaacggaaccgtacgagactaatggataaaatccgtattctcttggaacaggtggatgaagccattgcacaggagaactctataaaagacacatccgtggagtttactccctgcaggctctctgacatagtggatgaacttaaagaagccctggaacgccagcctgcaacaaaggataaggaagaaaagaaagccctgcgcaaaaagaagaagcaggtcatggaacttgaagggtatcgtgacaagctgatagaatacgacaatcaccttgatacccttggagaacgtaactcctattccaagaccgatcctggtgccacattcatgcgcatgaaagaagatgccatgaagaacgggcagaccaaacccggatataatctgcaaataggtactgaaaaccaattcatcacagacttccgtctgtttcccaaccctaccgatacactgaccctcataccttttttccactctttccagtaccgctataaccgtttaccgaatatctgtgtggcagactccggttacggttcggaagaaaattaccggttcatgcaggagaatgggatagaagccttcatcaagtacaattacttccataaagaacagcgtcctcgttatactcccaacccattccatgccgaaagtctccattacaatgcccaagaggattattacgtttgtcctatgggacagcacatgaaccgtataggaaccaaacgtgacaagacagcgagcggatacatcatcgaaagtgcccggtataaagcaaaaagatgcgaaggttgccctttgcgtggcagttgttttaaagcttgggggaaccgtattatagaagtcaaccaccgattaaatcaatacaaacggcaggcacgggaaaggttgctctcagaagaaggtatcaagcatagaggcaggaggtgtatagaaccagaggctgtgtttggacaaatgaaatacaacatggcatacagaagattccggcatgtgggagaagacaaggttacaatggactttgctttctttgctatagcctttaatatcaaaaaaatgtgtgctaaactgataaaagaaggaaaggggctcattacagttgccaaatatatgtttatgggactatttataacccgatataattggaatatagcaacttgttgccaaatgcatgaggaaaaagcagcatagccaaaagaaaatatagcagaactgtaaaatataaaagaggttgtgccaacgttttgacacaacctcttcttgatttaaagataaaattattttttctttctaagtactacagcggtacgggcaggaatatagagtttcagccactctttcttttccttcttgtacagcggatcggtaatagtgaagtgcacgacagagtcgtctgccaaaccatttcctccaaatgctacatcgtcggtgttcagtatcacttcataagctcccggagttaccagaaatccataatcagtgaatgactgctttggattaaagttaaagacaaatataaggtctttccgttcgtatgccaatacctgatcgccatcattatgccatatttcctgaacaggtgttgcctggaaatctttcacactcttgagaactttcagcatttctttatcaaaatcacccatatagtgataggtcagatttttgttgtccaccaaatcccattggcggcgggcatatttgcacgaccatccgttaccttcacgcgggaagtcaatccattcgggatgcccgaattcatttcccataaagttcagataacctccgttgatagtcgaagaggtcagcaggcggatcattttatgcaaagcaataccacggttgacaacataattttcgtctcccttctgcatgtgccagtacatatcggcatcaatcaggcggaagataatcgtcttatctcctactaatgcctggtcatgactttctgcatacgaaatggtcttttcatcctggcgacggttggttacttcccagaacatgctggaaggcttccagtcttcatcgatcttttctttgattgtcttgatccagtagtccggaatattcatggccatacgataatcgaagccgtaaccgccatcttctactttggcagccagtcccggcataccggaaacttcttcggcaatggttatcgccttcggatttacctgatgaatcacttcattagccagtgtcaggtaacaaatcgcattatcatcctgatgaccgttgaaataatctccgtagttacagaaagcttcacccagtccatggctgtaatataacatagaagtcactccatcaaaacggaatccgtcaaatttatattcttccagccagtacttgcagtttgacaacaggaagtggatcacttcattcttgccataatcaaagcagagagagtcccaagccggatgttcgcgacgagcgcccggataaaaatactgattcggatcaccggcaaagtttcctagtccttctacttcattcttcactgcatgtgaatgaacgatgtccataatcacagcaatacccatctcatgagcagcatcaatcaatgcttttagttcatcgggggtaccaaaacgcgaagaggcagcaaagaaactggatacatgatagccgaagcttccataatatggatgttcctgaatagccataatctggatacaattatatccttcttcagcaatacgaggaagtattttctcgcggaattcgttatatgtgcccactttttcctcctgctgtgccattccgatatgacattcataaatcaacagcggattcgtgtcgggcttaaatgttttcttcttgaatttataggggttctccggagcccagacttgtgcactgaatattttggtctgttcatcctgtaccacacgtgtagcccacgcaggaatacgttcgccttgtccgccttcccaatatacattcagtttgtagagatcgccatgatgaatggcatccgccggcaggttgatttcccaaataccattcttttgttttttcagcttgtaggcagctttttcctcccaattattaaatgtacccaccatataaatatgagtagcattaggagcccattcacggaaagtccaccccttatcggtgcgatgcaatccaaaataaagataccccgatgcaaaatctgaaagggtttgttttcccttattcgtcaattcagcttctttgtctaatacatgctgatggcgtccggtgatagcaccggcaaaaggctccagccagggatcgttttttacgagattaagtgtcttttccatatcagaattgaattaggattatgcttttacttttacgattactttcttcacaccatctggagtgataccgggagcatgacagtcttgcgggaaaaagatagcaaacattcccggttttacggcaacgtatgtttctgctaatccttcgaagaaagtaatatctttttcctcgttgtaaggtgcatctgccggaacacagtctttagcagcagtataccccattatttctgttcccgacaatgggatttgaatatcaataaattcgttatgagtttccagtttggcttcctcttttgttttaggtttggtttgtgcaatattcaccaacagatcttttcctttcagttctgtcttaccaacttccatggcttggaggtcatgagacttcaagaattcaatagcctgtgcaaacagagggtttaaagacgcatatttctccagattttctaaagtatctactaccatataagttaaattttaaagtttatattctaggcattatttattcaaaatcatcaatcgtataatttataaaatcggcaaaccgtttgaattgccggaacactttgtctatctgttccagtatatccggtcgggtaaagaagtcatctggaacattataagagcaaacatattctttacatttcaaataatcaatgtacttgaaatctttcggaaaacctttcggagctgttttcagaaaatcctctcctatcaccgggaagtatttcttaaactccggatcttctacgatcgcaacaaactcttcgatattatcatagatagattgtcgcactgctttcaggatattggtaggcagacacaggcttcctccggcaagcatagaaccatccggctgtaagtgtacataatatccacaatgatcggacttctttcctttggcattgatataacctccgaaatgtattttataaggtgttttatccgcagagaagcgggtatcccgataaatacgataagtacagtctttgggctgaatcccccggatagtttcatcaaacagggaaatacgggcgatcactgttgccaaaaagttgtcgaactcggcacgggctgtttcatattctgccttatgctcattaaaccactcacgattattattcgcggaaagatcttttaaaaactgaaagataacgggtatgttcatctttatcattttctattattactctacaaacgtacaaattttatttcatataaactacaaaagggggtaaaaggacataaaaaaagcatcggcctggtaaaaccgatgctctaacacatttatcaaaaaaacagactcttctgtctctgacgtactttagctttcacaagtgaagtacaatctctttaattaatcttatatctaatactatgaaaaacacataaatataacagtacaaaagagacttttgttcagcagttctctgtatatttcagttaattatagtttatagaattaaatgtttctcatttataggtaatataatgtgtttccagtcaatcattgcattgaataacatgatatgggaatagtctttcaaacatatttgcggaatgtctttctcaacaatgagctgcctgtccagaaattcgcttcgtttcgtcccccggagtaacggatgagctggtgtgaaccaggtatctccgtcatagagagcaacattagctatagaggtatctgtcagatagccatttctcacaattaaaatatcatccgccattcctttttgagtgtacaaggcattcagttcttcccgatgcgcacttttataagtataatcaatggtatcggacacaaccaaatgcaaagaagatacctgtcgcatctgatagggcgcatacgtaacttcttccacttcttttccatatacaatccggcatttatgaattccatttaaagttggcggagatataaattcccgtaaatccagcggagtgctgtctttccaaaaagctgcacgggtttcattaaagcgctctgtgtgataatcaagattataaatctgtccatcctctatccggatagtctcaataaatgggtacatatactttttgtttcatttcattatactcgctttccacatcactctggcaggtgatcccacctccacttttaaaatacatcttctctccttcctgttctacaaatcgtatcataacggcactatctaaatcaatgccatcagaatatcccataactcccgtataaaatcctctgtcgtaggtttcagcttcctgaataatctgcatcgtttttctctttggagcaccggtaatagaaccggctggtaatagcctgaaaataatatctcccaaatgctcctgataattttcaggcaatataccctgaatttcagaactcgtctggaaaatgactccccgattagtctgtaacctgtccatataccgataccgggaaactgacacccggttggcaaccatacttaaatcattacgaatcagatctacaatggtagcatgttcggcagtctctttcggatcattcatcaataattgagcagcagagggaattgaagcatcaatggttcccttcatcggatatgagctaatttttccttgatgaattctaacaaatatttcaggagagaaaaccgtaaaacgatctttaatccatagcttataaatcgcttttgaatgaaaataaatatctttcagagtgagattggtttctaccggagtgcgacacgtcaaattcgtaaggaaactatttcctgccaggatgttccgtcgcacgatattaaacgaacgttgataagaagagaaagattctgcgaaaggctgccaatgtagtgaaggcactgtttttgcggagtaagtagctatatcatcttcagccgatataatctgattggtaaatccattcaaattatacaaaacttcagcggaatcaacagcggcaacctcctctatataagatacatcttgtagataatttataatgaaaatgaaaggacggtggagttgtcccaactggttcattcgtttaatagcctgttccttattatataagtgcatataaaatacttctacgtttagggaaggcaaatgtacacaaaaagtatagattagaaaaagatagcaataaaaaagggttgtccgacgtgtcatatcggcaaccctttatcatttataaaattggtcaaattacttcataacagctttcacttgaggaagcatcttcttcacattttcattttccggagagatcttagcagcttcttccagatagtctaatgcttctttaaatctaccatcagctttttctttttctgcagcatatttatctgcatcagaatttgccaaaggagcagctttcttcaggatattagcgccatcattatagcacagaactcctaaactgtacaatgcatttgttttatattgcttgtgatccaaaggaattactttcttaaaacaatcttcagcttcttctgcttttcctgctttctgtgctgcaagtcctgcttttagataatgaagaccataattcttcaccattgtcttattcttaggatcgactttcagcccttcttctaatgtagctacatattcagcagtcttcttttgtgcatctaaagccaaagctttacgagcatacgcatttcctatattaaattttttctgaatagcaatatcgaaaaaggtcacggcttccgcatactttttcacttcgtctgctgctataccacaatagtaagctgttgcagaatcctgattattagtctgtttcagatattcgctgaacttcgcatacgctactggataatttttagcattaaatgcatcatttccttcttttttcaattgctctggggcggtttgtgcaaaaacattagtcactacaatacaaaatgcaaataaaaaaatcaatttcttcataactttatgtgttttttagttgtttatcgttcaaaagtaaaagttataatagaaaaacacaaccctattttatttttttgagctttttgaaacctatataacgttcgttattcttcgtaaaaatggcgtttttctattcattcttcccaaaccatataaataaacaaaatgccacctctattataaactactgattcatagtcacaaagaaatatatgaataaaaaaatgccagaaagtttttgagttttcataaaaagcactacctttgcatccgcaaataaggctggttccgtagctcagctggatagagcaacgcccttctaaggcgtgggtcaagcgttcgaatcgcttcggaatcactattaacatccggtaacagttaaatgttatcggatttttcttttaaatagctgatattaaacgttttactttcgccccgtttaacttttaataacctgcctgtgtaggcatatttgtaggcatatcccctctacaggcataaaataggcatataaaaatgacggcaataagagttgtaagacaaggcaaaaaaggcaaaaccgaccggctccccctgtatgtggaattttatatcaaccgcgagaaaataagaatcgcggtaaggttaagtgtcacctctaaagaatgggatgagcaaaacgaagtgataaaaggccgggacaaagaaagtaaggataaaaatttaatcatctccaatatccgttcacgagtaagcgatatatttgtccgtgcccgtcttaaaaatgagacgctgacaaaagaaagtttcttccgccagtataacaatccctccgattttggtaccttctttgattttgcacgggtttacctcaaacaaattagcaaaactatttctttcggtacctggaaacatcacgtttctatcatcaagaaactggaaacattcgcacccggccttgtattttcagagattacccacgaatttctcctgtctttctttgcatatcttcgcaaaataggtaacatggattctacggcatggcgtaacatggctactatcaaaatatatgtaggtgccgccatacgtggcggttatatggaccatgacccgttcgcggccataaagatacgtcgccccaaaagtgaagttatatacctgacggaagaagaactcctccgcctgaccgctttgtaccggtccggccgcttggaagaatgtacccagaacgtactccgtttttttctgtttctttgttttacttctttgcatataggcgatgcaaaagcattgcagataaaccagttcatagggaatgaactacactacacacgaggcaagaccaaaataccggtaactgtacctttatcggacccggcacgttatatctatgaatattatcgggccggacgtacaaaaggcaacctgtttatgaaccttcccacggatcaggatataaaccgggtactgaaaactatagccggtaaagtaggaataacaaaggatatcagttcaaaaaccggccggcatacattcgctaccctgtattataagaaaacacatgatatcgtaacactatcccaccttttgggacatagttctataactatgacaatggtttacgcacatgttctggaggatgaacgcgaagtgggaatacacgcctttgatgatatgttataaccccaaaagtgagggggaaacgtgtttcctgcttcccccttcacttttctactccaacgtataaacgctccagtctatcgcctttttaagtgcccagccttccttttgtgtctcctgtatatgtttcacggcaccggtgtaaaactcttgtagttgctgcatacttgcaaactcgtaaaacgtcgggttgtcttcttccccgagcttgaaagtaacaggaaggttttccccgcctgtctgcaaggcaagatcgtacgccgtcttataattcatctggttctccatggaaagccagactttcaggccgttccatacgtacccgctttcgatcgtgtcggttatcttccggttataccattcattaataaccgccttgatttctgccagtgcgggtagatgatcgaacgtctcttccatgtaactacgttgcactccttcgggtgtctctgtttcctggtaatcccacgtaatacgccagattccccggcggcggttggtacatcttaccggttccgccttgctgtctgcataaattcgtatcatttcaagtaaaatgtataattatcaatcctttttcacttacttcaccttcgcaatgtgcttcaaaaggcagttctccgtcttttgccgctgattcacaaatgaaaagtgtttcctccaggctggtaaaatactttctctccttgccgtcgagttccagctttataacagtccggtttccgtttttcgtcggcacatccttttcataatcaagtacgatcacatctttgttcatcagttcgggcgacttgatccttgtcccggtaaatcgtttccgtccgtctttaggcttgtacttgtagcccaaatcttttaattttttcattttctttcctgttagtttataaaataagttcttgcaatcggcatgtttcgtaagcccgtaaaatgaagcggttaactcctgcctacgtttcttgcttttaatcttgtgcatcttgcgggcgaacttttgtttgttacgcttccttaaccgtacatgatccgggcgggttacatatcccagaaagtcgataccttcggtgatcgggaaaacggtatcattgcttttaatctccaggcgagctttccgggtctgttcatgaatgatatccctaaccttccaaaggtatttcttactaccggaaagcaccagaccatcgtcacaataccggtaataatgtgctaccgcctcctgatcctttaaccggtgatccaggtaaatggatagaagcaaattacaaagcccctgtgatgatcttagcccgatacttacgcctttaggcatcatgcggatgcactcttccaggattccgatcaatattttatccttgaacatccttttcactgcatccagcaaaacgtcctggtctacgctctcatagaatttcgttatatcgaactggtacccgaacagggttccttcgggatcatcctttatatctttaacgatatactgtaaaaggtcatgcgttcccctgtttttaatggatgcggaagtagtccggataaaacgtactttcaaatgccggtccaccacattcataacagcgttaagaacgatcctgtcctccagggaaaccgcttgtacgatccttaccttcggcccgtcgtctacggtcatttcccgatatcctccgagcttgaaccgcccgctcctgatccgtttcctgatcctctctactgccttcgggacatccgccagtattctacgcccggcaaagctgcgctttcgtcttcttttacgcaataccgtttttatggcgtcctctatattggagtcctcgacaatctcttctataatattatcttctctccacatgataataaattagccttcaattccccgggccgggcttcttcgaaaaaagttcctaccaaaccccattgccctgcgctttatttttcccctttccagccgtaaacggctgctgttggcgaggctcattcctcttggctccacgccggggacacgtccccactgttgtacgccaatttttaaggcttatgcgctttttctttatcctaattgtttgcaagccgaacgccgatgttcgcattcgtgttcgatgaatcgttattcgcgttcgcatacgaaacaccgcctaacgcgttcgcgttgttgttcgaccgatacaccacacgagtgtatatgaggaaatccgcctttgtactttcaggaagcaccggcacccgtcttacttccggacgcctgcgctacccgcacaacgttttacgttgttttttttatcttaatcagcctgatttatggctttaaaggccgcgacgctgcccgcccagcgtattatgcccctgaaggcaagccgaacgccgatgtacgcattcgtgctcgatgaatcgttattcgcgctcgcacacgaaacaccgcccaacgcgctcgcgtagtagaacgaccgatacaccacacgagaaagcccggtacccacatagaacctgtcgaaccaatgtgaagaagtggaaccgccttctttggctgcaatcaaatccatataccggccccaaaccatgtgggtaggataaatatccgcattataaacagtaattccctgtacaacgcgttccgttccgtccggcatggtaataaaccaccttccgtccgctgccgtcttgtttaccgtgacatactgcaaccattccgccttatttccctggaaattttcatatcccagtacattgacggactgataatttacaccgtcccggtaagcaccttccgcctgtggattggaaccgcctttttccttataataagaaaccgtatcacgcatccccagtgcatttgtaaggcccgtcactttttggtaattacttgttccatatccgcaaactccctgcgaatcggtattaccgtatttaaagaaatgcagattacccacatccttgtgcatctcccagtcgaacagctggaaacctttgcccctgttctgggcgtatttgattgcctggctctgtgaaatggttcctacacttgaaacaccactgacagaacgcaatacatcatcaatcaagtaagcttcataagcaccgcccaggcattccgtatgctctacccagtccggctcgatcgcttccacactttccgacgttgtgagtaaaacgaaatcgaaggccgccgaattaaggaaagtaaaggccaggaaagtagcccctgcgggaacagcacaaaacaggtacataccattaataaaaccgttcgcgtttgaaacgcttacccgacttactattttgcccgtatcatctataaatgcagccccgtaaagagtggaagccagaccggggaaacggacctgcttgtaatcccgcacgtccaccagggcgaacgatccggattcgtattcattcttcgcctcttcaagggtcgtgtaatccgtattcttacgaatcccgatcccttccgttacctccagctcttcgcgggtaagttttacactggtgtaccctgccgctgccggcgcatcctcattgcttgaaataaaaccgtacagacattggttcagcacgtccgttactcccttgtaccagtaatgaggctcatatacgtaaacttcgccttccgatccggttaatactgcatccgtggcgttctccacgctgtcactgtcggcgtatttgttccggctctcatcatgaagcggataacaggtcatttcaccctccgccgtctttttggccagaacgcaatgtcttttcgccaacacctccaggatatgggaagacggggtaaattccgtattatagtcatatccggtagagttatccaggtttgtaatcttttccccgtcctctaccgtctggtctatttttatgcagacaaactgcggctgaatgatattcagttccgggaagtgcgcacaggtggcggcgtactcttcgtccgacatggactgggtcagccggtacgtacccaccaggcggcacgtctgcacgtttcccccgtcttcatcaacaccgcccattgtcataagcccgcgaagcaaacttccgtccccgtccatatctataccggtaattcgtagatagctggtcgcgctgcattgctgtaacaacgtgttccagtcgatcaggctacagttatcaatcacaaggcgcgtgatatttgccgtgctttccagctgcagccctgcattggtcagtttgttcaggtaccggagctccagcgtctgcaaagttgcgggaaggacgcaaacggccagaggcgcaccgccggcgaatgtcacaccggtaagggatgtatcaccggccaggaaggtttcaagtttggtgttgcttgaaaggtccataccggtaaaggaagaggatttaagcccggatatgtcgagttgtcgaaggttacggcaattacccaccagaagggcgttaagtgtcatctgtccggcctcacagctaacattcagttcacgcaaggccgtacagttgttcaggttcaacgtgccgacaatggcgtgggctacatccgtcagatcaagcccgcgaatacggcttgcaccgtagaaatattgcggatcgtttactattaaatccgtgtccattgtcagttccaccacagccccggccgtttctgcaagtaccgcgctttggtgcggtgttccggacgtgtaaccgtacccgtaataataccgttcggaggccgtaatccgaattttccggttatcgctgccgaacttatacccgaaataagccgcgaagctgtcacgacgataagtaccggccacgtattgactatccagaagggcgaaacggttctgaatggtataagtacggtgcgcgtaacggcttccctgcaaggcatacagataattataataactggttccgctgccggttgtcaccccttcggtaagcggaaggatatatttatattccgaatccttgttataaatccgctcgcaccagttgcccatttgttcctcgttaaatacttgcaggacatattcaaggctcatattgctacgcaaggtttccgccacttcacgcaatttgtccggacaagaccgtaccagttcccataaaacggaatcatggccggcaaaagcataactaccgatactatcgtcaaaactttcgtgggtaatggtatattcgtatttcagtaccgaatcattacgcacaccgaacagcgtgtccatatcgtaaggaaggaaataccagatcagagagtcccaagtcgccagcatcatgttttttgcccggttatccacagccataaagtaatcggtaatcagataccatgcaaacgggctgtcattaccgaaatactggttatattccgccaggaacttggcgggatcatccttacatgaatcgatccagttccaaagccttgtaactgccgccttgtcgtcctcgtgtgcatccgcccaggtagtgtccgccttgaaacgaaattccagcgcatcatcaaaagaagacatgtcggtagtcccgaacagacaaagggcctcggagttgttcaggaactccagacagatacatttgttacgctgcccgttcagggccgcttcgtcgttgaatccttcaattccttcaaaaccgtaaatgatcgcactttccgacttctcattattgaaattgtattttcccagataagtattcgcaccggtgccgtcgttgtcataaaacaggtccatagggaaaccgtccacgcctatacgtacgtcatattcccccttatatgcagcctgcggcggtgtcagccacccgcacctcttccaaacgtcgttcacaatacgcaccgcaccggtattatgtgtaccggaagaatcggaaaagtccgctttcaaacagaatatactgatcggccgtgctcccggtttgaaactgtattcaagggacggcacatccacgccgttaacttccagcgtggtaccgtatttttccaggcgcaagaaataaagacggtaattcttacgcggataagtggtggatgatgtaccctgtattcttagaccgacattccttgctacaaaatcgtactccttaccctgcgggctataaaaatagatatcgaccggtacctcgaatttcttgttattggtggcgttgacaaggttcacatcgccgacaattcgcataaccgcctttccctgggcgcgtaacttgtctatgtcgatatccgtaccgttgtcccccgtaacatcattcttttcaaataacaggaccatttcgtccgacgtagtccggtctaccatgtaattgttcaattcttcatcatccgtaagcgcacggttataaatacggaaattcctgatctccacatccgccgtatcactgaacaaacggatgttcaccggttccgcctgcagtaatccttcggtagccccatactgcaccgctccgcaacggattccgtttacataaagttccagcaaccgcttaccggccttggccccgacaataaaggccattttcaggttcatatcacttgcaaacttcgtacttacttccgtaccgccggaaacacgcataagggcctgctccgttgtcatctggaaaccgatatcgccggccatacagtccagtatcaccccctgccggtccgttaccgacgaacaaagaatttccatttcataggtagccccggtagtggttgcatccgtggagaacggccggtacccgatttcaatcttcgcgcctcccgtaagtttcagggcgtcacccgtccagccgttgctgctccagtcgaaaccagaaaatgtcgtatgtatgtcgccataatcccaggctcccggatcggattcgctgttgctccgcccggctgccgaaagtttcagtacaagcccggcggtagtttcctgcaagtcgatcccgctttccgttacgtcgatataaaacgggtattccgtggcccccgtcttaaatttcatagtgatctcgccctgctccgtaaaacggttggtatatgtctgcgtagtacgggccacactgacagactgcgttttcaccccgtcccggtaaacgtccatttgagccggcgttgcgtcaggatcataagccacaaagtcaaattttacctgttcgtactgccccgcttccaagcgcggaacaagatggtcctccgtaaaaatacggccgtccggaaaactcatcatcgtgccgatgaacggtgccgatcctccggatttcagaatatcaatatagatactttcagactttaacacgagatcggcggaagcctccatttcggcaaccatttgaacggtattccggccggtcacaagcgaagagggggacaaactgaaactgccgtttgtcgttcccgatcttgtaatggtgtgcgcgttctgttgccggccgttcagataaagcgtgacgacctttgttccggaaccgctcacggcataagggatattaatcgtgtcggccagggtataaccgcctgcggctatggccccggccagattgtaagagctggtaagggaaaggctgacaaccttcacggatgtaaacgcctgtcgggtctgtttcttgccggtagtcggatcggttgtggttgccactacgtaaatatcggtattcccaacaagcaagtaacttgaaaggtccagttcgtaactgcctttggaaacatcgctgaccgtctgggaatacatggtagttgttccacgcctgatcgtaacggtgatatccgccttttgcccggtagattcccccttttcatcccccgtggtgtattggtgatcgtatgtataagtaagacgggcgtttccgccttccttgattatggcgttatctacagccgcattcaagacaattttagtagccaccgtttcgccggaacctccaccggaaccggccgggatatccacggcggtaatttccgcgccgcttttgttctggaaagacagacggacggatgtttcatcctcgcttacctccgcatttacgttaaacagcgtggaagcgtccacctcgttaaaacgggcggttactaccttgttttctaccggattggtggaatcggtggacaaagtctcgtccacttccaggatatccacgtttacattcacattaccggccgcgtccggcgtctgcttctcgccgtttaccgttacgctctttaccgttcctttgccgccgaactcttcccagctcgcctcctggtcccaggcatccagggcggttccggtaaactggtacgtctcccatttgccgagcgatgtttcaaaggtgatgacacgcccccggccgcgccacttctccggtaccgcggcaatggcggaagccagggtatagaaaccttccgtaagcggcacactgccggttacattataggtattcccgccgcctgaaccgccgctgccgaaatcctcccacttttcgacattctcaaaatccgtgtccggattgcctttaaattgtttcgtcacccagccgtcggcagtgaggaaagaaaggatcacgccgtttttccggacatcgtcaatcttccccgccgttttcaatgctgcaaacacccccgacagatcactataaacgctgccggcgttcaagaggttgtttacattggtaaaggtggaagacagacgcccggcagtttcctgcaactcctgtttcatttcgtcacggtctgcctgcaacgtgcttatgtcctcggaacaactgctaatatcctgggacagacttttcagctttccccaaagggaaccgtcttcactctgtgaaccgtcttcgctgccgatacgggcgttgatatcggccagcaatgcggccagcgaatcactgtctttaagcccgtccagaaaagcaagaatttcgttaaagttgtcgattgcctgcgaagcgttgttgccgacaagccggtcgatacgtagagaaacggcgtcgatagccttctgcaaggctgcatcggcggcaatgcgggcggcttcctccgcctcgatttccttaccctgggaaaccagtttcaggtgttcgttcaagaagccaagaaccgccgccaccatttggttggtaacgctttccgcgtcctccgcggtttcaatgactataataagatcatcgatatactcctgtgttgccatatagatacattaattaaattgtttactgaactctttggaatgaacccgcggtttccggtagccgctttccgtgatttctcccgtccagttggactccttctcggcaaacgtgagctttaacgtcacgttctgcggcgcgtccggacggacacggtaagaaaactcttccgccgaaggaattaccttgatctcttcccggccgtaacctgccaggtagacatcatcggaggaaagcaggtcaagaagaaagcgtatttcctgcgggcgtttgaatcccgtcttaaccgttacggcttcctgtatctccgtacgtatgcgatccgaataataatcatcggtaatttcatcgtaacgccggaaaacagcgtcttcgtcttcatccatgccgggagttacgctcgcctcgccttccagggaaaacacctcgtaaaccccgtaactgttcaggaaccggagccggtaacgctcgcggaccgtcgggctttgctcgatcccgatccggagagcgaacgtttcaccgctatacacgtcaaaaaggttggccagtaccccgtaatcggtaaagaatttaagtcttacggcctccaggttcaaggcgtagaaattccctgccgtgcctggtactgcaaggctttgtccggtaagaagttccgttattttcagctcgtgctccggatagatgaaacagagcgggtaaagttccgtctcgcgcatcgttatacgccagtcattgctccgggtggtaaagaagaaattgcaggattcattcaagaacttcaaagaaaagatgttattaccttcttcatgcaatttcttaaaagcccgtttggatataccgccacgccaggcagtaacaaccaaagtggccgtttcttcctcctcattttgaagggtgatcgtgacgaccgccttgttataccgtttatcggaaaggcttatcaacatctcggaactgtccgttaacgggggaatatcaacaaaaagcgtttccaggacctccgcgatattcaccttgaaacttccattaccgttaccggtaaatatggaacgcataaattcaaagttcacgaaatacattatattgtaagtcgccatagaagtagtttctaccgaaagataaacagggtttccggtaaaggcgttttccgtcggatcaatgtttgctgtcaaactcataattcaaaggtgttaacgatgaatattccgttaaactcactcttattttcaagtccggaaaggaaacgatcacgctgatccgtgggagacgtcaggaacttgtaaaagtccgagagccgccccgcatggttttccctccaaagcttataaagctccgtcacctgtgaagatgacggggcaaggatgatattattctgcttttccatgctgcaaaagttgggtttatcaaaggaagaataaaggacgggatcagctaagcaccctcgatgcgacaaaccttacctggtattcgacttcttccgtttcgtaacaaaaatagttggccgcgccggaacgctcgtttacctcgatttcaacctctatcttacatttgtaagttttttctatgatgttatcctgtgcggtgggcggattttttaatatatcctcatccgttgacggcgtaacatacccgtcatatatcgtattcgatacacggcaaccgtacacagcatacatccagtgataacggtaataatcttcccaatattccacccttccggcctgtacaccctgcaaattggaagaatatacgacccacacgtaggaagcaccgccccacacgggaatgccctgttcattatccagattatagggaccgatcagacgcagggaacgcaacgtaatgtttaccggtaccagtttacccgcaggaagcgaataggaaaggccgtccagaagcatgtactgcccccgcagggctaccggggtcaagacatccattttcataagctggtgaaccggtaaaagggtgtttgtgtccacctggttaaaagagtgccttaatacggcgtcatacttctgccagaacttggcaaacagaccgtcttcaaactggaataaaagcgatatcgtatgtttgctgccgtcttttaacgtaatttctccgccgtccggagcgtatggtaaaatagaaccgaaggaataatccgtactttccgtaacggcctttgtaaaagcgaaagcgaaggaaagcggcgtctcctccttttccgaatcctcttcatcatcggaagaggttttcaggtaggtataacggtgcacatacccggccaggtaatacggggaaagaaggccgttcggggcaaaatccataaacacgcattcatcatcgctcgccagctcctcgtcctctacgttttccgtcttccggtcccagttaaagaaactggatgatgataacgtatgcttcttgttgcccgaatcccatttgtaccagttgccggtggtcttctcgtagttcagccacacggaggcctgggaaggatcgaaacggcttacacggataaccattttttcgttccccttgatatagtcctcgtaccgttccaccgaaggcgcggcaccggtaaaagacgttttggccgataactttatctgacgggccgtttcataattgataaggggttccgccgtcagattccgggacagatcaacggcaggttcatcttccattatatcccggatcagtcttaaagtggccgttttcgtatcggaagagacattataaaccagtccgaaacgtacatacagcgcgtttaaaaagtcctcaatcgtacaatccggcattaaatcggcataattgaggatacccgtcacgcaacagtcggcggcattgttcaggattaccaggctggaaagttccttgtccgtcttaaaaggattttcggttatagtataaccaaattctgaaaatataaagtccaggacacggtgcacgtataagaagggggccacgccgtacccttccggtaaactcgtttcggtcggggtatcatttatcagtagtgtttccgtccttgcctgatagcataaggcatattcaccgtttgaatccaaagtgatacggtttatgtattgcgggtaatacgtgccgtccttggaatcatttttgactactatttgaaatatggcaaaatcttcatgggaatccgtgaagaaccagtttatagaggacataagaccgctaacggtaccgccgcttatgctgggtaatgtgatcgagttcagtttctttgctttccaggcgctgtaggcttccgaattgtcaaaaccgatatttaaagtaattccttccgtcctgccggcggaaacgatatttatctttccggtacgtttatacaccccgtccaataccgtacatgtctgatcttcattcatcggttttacacccatgtcgagccggtgggcaaaaccggttatccctgcattgttggcagtgacgggaaccgtgaccggtacggtttgtgatccccggtcgttcatgacgggggatttctcgtcgatctgtacggtaaagtcaccccctaagtccagataacctttgttcgtcttaatctttagcataatgattacttattttccgcgtgtaaaggtgtcgcgggcgttatctatagtttctttggccttctccaaatcctggtaaacgatataggcctttatcaatttgatagcctcacaggaggcgcgaagctcctttgccgcttccaggaactcccggtaggaagaatcacctgcaggggaagtcacgtaaccgccttcataatattcacccggattctgtggtaacgggttggcactggtacgctgccgcctgatcgcttcgatagtgctaacggcgtcgatcactttaggattattcatttccggctgtggtaccacatattcccccttatgaaccacgccggccacttcataacgtccgccgggaccggtgtaaccaccttcataatacccaccaccggaagaaccggaaacaacacgttcagccgtggcggtcttgctgccggtggtgtttttcaaggacatgtttttaatcctgtcccgttctgccttggccgatgcaagctgggccacaccggtagccgcaagcattactgcagcaacggttccggcaatcggcccgaggtccgcgtacgccttcataatcgaaacggccgtatctgctatgatctgggaacacttgatagcaaagtttacatccgcgtacttcttttgaatctccagtttcttattttccttctcttcttccagggcggcagtatcttcaccgttgttctcggcttcctgtatgagaacatcgtattttgcttccacctggtcgatttcggcttgttgaatggcttccaccatggaagaggaaagaccggaataatagtcaaagtattttttagcgttattcatctgcatttgcagctttttacgctggtatgtcttttcatctattaattcctgatcgtgcagattctttaacagggccagttcattctggtattcctgtgcccatgatacgccgatctgggattgaatctggtataaactattctggtattcaaattcaagctggctaatttcctgctgtttctgtttctccaaaccaacggtagaaattcccgcctgcctcgctatctcaattatagcattataagtcgtttctacatcctgaacctgcttccggtgtgcttcctgcataccggttattcctaccggaacggaagttatttcacgtactttttgggcaatggccgcccgatcacgcaataacttcatttcagactcacgcacggcgtcggccgcttccgtcgctgtttctatacgtttctgtttgccggtaatttccaaagcggcaatatcattctggtaagtacggtttatctccagaagttctgcggcgtgctccgcttcaacttccagcatataggcgtcggcggcttcctgcgttattctctggtttaataccgctttttccatggtgtccttctggacgttgtaataggcagtttcgatctttaaccgttcatcccgtttctcctgtgccagttttatacgggcgtcctcctgcttgccggtttccgtaaaaatggccgtctgcgcttccgtttcgagcttgtggatttcatcgagtaacttcttcttttgggccggcgtttttgcttccagcttctggagggcgtcaatacgttcccggtaatagcgaaggttttccgccgtcccttcaagaatatactgggcttccgtcttattttccttttcccggttctctttgattagaagcatacgtttttcgtgctcgatctccagaggctttaatgtggcggccgtttccgtatttttgtactcccctgcttccactttctttttgaccttccccagttcgtttaaacgttttatttcggcgtcgatacgttctatttccttgtttttcttggcgatattcgcttcgctgtcttccgcccattgctcctgaacctttttcttttcggcctccagtttctttataagggatgtttcagtatttatattttctttattggtcccggttaatgaagtggccgtcgcctctgtttttaagatatcattattgatctgggcgattgctgattctataccggccaaatccttctgtgtcgtctgtagggctttcaactggttagcctctttttccgtaccaaataaacggcttattttagcggtaagactgttccggttatatcctgacaatgtattttgctggcgggtgtcccagtaagcgtcgctttgctctgattcctggctttcaagattcctttttttcttgtacaattcttccagttcctcctggtaagctttcaacttgatttgtttttccaaggaaactaaatattgatctatagcctccttgttgttgtttatgagcctgccttcttcattcaattccgcattataatccggtatcagttcttttaattcagcgagcctttgtttacgggtgtagttggaaaggttctcgtcattgatagcagctacaagagtttttatttttgcttcctggctggcatattcttcattcactttctttacgacttcctggtgggccttcatcgccgccgaagcctgttccgtcttctttgcaagctggtagatagcaacaccggctgccacgagtaacgcgagcagggccgtatatggattcttcaaaagttcgatcctcattaaccgaagggcggcggtacatcttttaatattcaggtgcagcaatgcctgggccgccgcataagccagagtagccgcccggctgatataaagctgtacggcgtgcgctttctctgcaacgaccgaagcaagggtcgccgttttaaaacgggcgtgccacatggtagcgattttcagtcctccatagtaggaaaccaaataagcggtaacggtataagtgacaacaccccatttattaaacatgtcgatcataccacccacaccttccaccataagcgtaacaaggtctattaaatcccggagaataccctttgattcatagaaacgtaaaactaccccttcaatagttgaacttagccggtttaatgcaccctgaacgttatcacccatttcttcggacatagcattaaaggcgtcttccgcacctgttaccgcatcgcaaagtgccagcacggtatcggtaccgttaaggaaagtgttaaacgctgcaacggaacgtttatcggtcagttcaagggccttgttcaagtctattccttcgctgtttagttttttaagtccctttaccagatcatccaggttgttaaccggaccgccaagagcaagcgcgagtttgccgctactgtcagccaggttaagcaaaatattacgtgttgccgtcgctgccgatgaagcgtcgaaaccgctgtttgccaaagctcccaaaagggcggtcgtttcctcgattgtgaatccgaaagaattagcaaccgggccgacggtagacattgcactattcaggtattcaaaattcagggccgaagacgttgtacctattgccatagtagaaagtgcccgttccgtatcttccgcatcaaggttgaaaatacgcaatgttgcaccggcaagcgtagcagccgaggcaagatcagtgtccacagccttagcgaatttcagcacggaaggcgtcatcgctttaatatcctctttaaaaaatcccagcttggcaagctctatctgaagttccgttacctgtgcggccgtataagaagtagtagcacccagccggcgcgcttcatctgttaaatccttgatactctttttcgtggttcccagaatagcggccaaagtactgtttttcttctcgaactctataatagtactgatcgcatcccttagcccgccgacaatctgtccggttatcattgcgccgatagtgacaaacacaccggccagaaccgtttttatcttattcagggaaagaagggaaccgccgaaaccttccgcctttttcgtggcctgcccgtatgctttctcaacttctttcagttccttctccagggcggcatatttttccggctgcaaggatttcaccgtatcgcgaagctctttccgcaaggcgtttgccttccttgccagctggttggcactcatggtggttttatccagccgtttctcacattcggcaatcttcttgttattctcgccgagcgtcttattattttctttcagttgctcatcaagccttttccactgtttaccaccagctttccctgtggcgattaaatcggtcatagccttttttatctccttattgctatcccggagctccttgttcttttctgaaagattatgtatttccttctgcgcatcggaggcgttcagggttaacacccattcgatatagtcaggttttaattttgccataagagtaaattttataaggcaaaattatcctggtgtaaagtggcggaaaaggacacaaaaaaagcccgtagaaccattctacaggcttattatactaagaagaaagtattttatctcttaaaggtaaaatccgaaggatcaaaacattctttatccttaattgttgcccgatctatcatccagcaaatgtaccaggttagaggaaccgatataagaggcgtcacgataaaggaaagaaaggcaaaagcaagccacccggataaagtagccggtttatgcttacatcctacgaaaaaaaatattaccaggaaaaagccgatcaaaaataaaatatcttcgtatgtcatacaatcatcgttagttctttaccgatatctttaatagtatttactattagggcctcccgttcttgtgagggcttttttattccacttatatattgagacataaggctttgacttattcccatacgtcgagccaccgcagaagcatttagttccgggtgagaaataaaaatccgatataagaaagtttcttccttcttatcttgaatagctaaacaatcattcatagggtctaaaaatatgcagctataccaatttcatataaaaactccggtgcaaggtcggcaccattggcccattcaatagtagcacgggttaaaccatattgaacaaatttttccttatccaataactccccgaaaacctcacctgtaagataaggttccaaatttacgatctttttactcccgtcgctgaaagtaacaagaagctcgtaattcctaatataatccacatctataactcgtaacataagcgtttattttaatggttcaattttatctattttttcccctttttgggccttttcccaaagagaaagtatttctgcctcgtgcaagttaatccactcatttacttttgcaataactttagctggagcctgaccgtctacaatccgatccaatacgctaatagaacattcataatcaccataagtaaccttaattccgcaacactattataaattaaactttttaagtacctgagcaacaaaaagttgctcaggattttgccatgtcagaattttcacttatcttagtgttgcaaaaaaaacaagagaatccgacgatagacatggcgaagatacaaattaaatctgagagactcactccttttgggggattattttcaatcatggagcaatttgactccacattatcatctgtaatcgactcaaccctcggtctaaggtgtagatcgttcggttatcagtacagcgaaatcatccgttctctcatgagtatctacttctgtagcggttcatgtattgaggatgtcactactcatttgatgaaccacctctcgcttcatccgacacttcgcacttgtagctctgatactatcctcagggcgataaaggagttgacgcaagaaaacatttcatacacatcagatatgggcaagacctacgatttcaatacggctgacactctcaatactttattgctcaattgtatatttgcatctggccaactgaaagagggtgagatgtatgatgttgatttcgaccatcagttcatagagacagagaagtatgatgcaaagcctacatacaagaagttccttggttatcgccctggcgtggcggttattggcgatttgatagtcggtatagagaatagcgatggtaacacaaatgttcgtttccatcagaaggacacgctgaagaggttctttgcgagatttgaacagaatgggctcactatcaatcgcttcagagctgattgtggatcatgttccgaggaaatcgtggaggaaatagaaaaacactgcaagtccttctatatccgtgctaaccgctgcagttcgatctacaatgacacctttgctctcaaaggctggaaaactgaggaaatcaatggcattgagtttgaattgaactctatccttgttgagaagtggaaaggtaaggcatatcgacttgtgattcaaagacagaaacggatggatggtgtgcaggatttttgggaaggagaatacacataccgttgtatcctgactaacgactatgattcttccgtaagagaaattgtcgagttctataaccttcgtggaggaaaggaacgtatcttcgatgatatgaacaatggtttcgggtgggacagattgcccaaatccttcatggcagagaacacagtgttccttcttcttacagcacttatccgtaacttttacaaggccattattcaaagacttgacgtaaagaagttcgggctcaatgcaacaagtcgcataaaagcgtttgtcttcaggtttatctctgtaccagccaagtggatcaggacatcaaggcggtatgtgctgaacatctatacctgtaataatgcttacgcagatgttttccagactgattttggataatgcctacaacttatgggaatgatattgtgtattgcctcaagtcacattgtggggtaaggggatattgtaggcagaagtgggtgcttcaagttcaaattatctgcaaattcagtaatgagaggacgtgtaaacgcaataaggacgttcaagggcttagttgcggatttgaggagtaaaatgaatatgtggcggattatgatctttccaatagaggaatataataataccgaagaatctacaaatttcaggcataaactttgttttattggttactgaaacaaagataggtaataaaatcattacctacaaatatttaggtattaattttattacctattttagcgaactggcaaacatttcttttatcctttcccttacataatcctgatattcatatttaatcttcccgagtgtgtcatgatacagaatcccgtatatctgtcggttataaatctggtaattaccgtgtttcttcatatccaggaagcgggtatataatggaaggttagaatgtgcaattaccccctcgccgtccggaacgaccgaataattcgggttctgtagtgcggccattaatgcaccggatcgcccttggatgatctccccggttccctgtactttcttacgttcacggcctttctggtaaatccgtttggtagcgatatccaattgggcttgaaatatgtcctgtattccacgcccgatccggtcggtaaagaaatccgttttaaaattctcggccattcagttattcattttttgagaatccggaaataatgtgcctttccccggattcatccttaacagtttcatttttcttgtttgaggtatatttatatttccaataggtacatagcacatcatttacacctattgtaataatacctattatgacagttaaccagaaccacgcaaaagcatccattagaatcttgttttaaatgagaaagccaggctccaccctgcaaacgtccggtaaaagccggattccggaagagtggaaaggctggttaaatccagttccttagtgacagggcaaccggtggcagaatcttctatcagcatttgtttgatacgttccataaccggctgtacctcttcgatagtctcataagcccctttccgttggggatcgtacttgctcataaggaaaataacgcataaattattttccctcacattgtcagccgaaaggctggcacccgttcccgacgggatcagaataaagagcaccggacattcttctttagatagtccctgtatcgtcttactcatttcctcgtcaatggtaacgggcagcaccttctttatttcaggaatacgtttttgcacgccttcccagtattcacggtaaacctttatatctatcatattgtcaatccctgataacgtttcgcctcccattcacggcgggtaacaagccccggaagaatcttaccgcccccgtatatccactttttaaactctgccggtatggatgaatcatacgcatctgctctgatcttcttataaagcgttgatttcttgaattttccgatacctacattaaagcaaaagcttactaccgcgtcaaactggtactgtcccaaatgaaggggaagcgcgtttacctggttttctaccgccctgatatccgattcaaagaaagcatcggcctgggcctcggtgataacatcacccggttttacgccgatcgtgtgaccgtaaccgatcgtacatactcccgcggcacatacatacgctttcaggcgtaacccctcgaatttcttgatcttgttttttgttcctgttgtcgttctcatttcttgttacgtttttggtgtaaatactcaaacttacatttatacagataaagcaatacatcccaaaagggtgtatcgtccacctccttcttatttccgaacacgccggaagccgccacctcaaagactatcccggtccagccggttttatcgtccgccttccggtcctcggatgccagcttctggaacaatatccgaaagtcgatagcttcaccaccgatataaaccggtccggaaagaaccatttcccaaacggcggaaaagaagtttaccgcatgaatggcaagcaaggaaggaacggccggcgtcttctccgggtccttgtaccggtaaagctttaacgtgatatcctggaagaattcatttatagccggatcgtctttttctgctgccgcctgtttgctttgctgcaacaaatccaggcaatcacaaaagttaccgaaagtaagaccgttcagcatgtcaccgacaccatgccagcccccgaaatcctgcatcaggttacgaccggttttcagaataggcgtaacgatccgctcgccctccttaccggttgtataagagaaaaagccgtccagcttttccagttgaccgtccagctctcggatgatctcacgccggtacatggtgtaatccgctttcatgcccagaaggaaagaaagccattttacgcggaactgtccggggctgatcgtaccgcggttcatcagtaccgacaatataagaaactgccggtactgctcactactgacttcatccaggcaggaagggacctccaccgtcttattattatatgtaaacttctccatgtccggacattaaaaggttattcctttggattgtacggtaacacccggtatatagtaatccaccgtttccgactgtgcgtccagctcacggatgatatcctgcaatacatccaggtaagccgccgcgtcctgctccaggctgttagcaaccgactgccgggcctctttttccgcccgcagtttatcccgtacggttgtgctctgctgcacctgtacgattccactgggcagaacttccaccggtaaacgttcaacggccttttttatggtaagaagtgcaagcgggcggcgtacatattccagcaatttctccgttaaaacggtatcgccttcaatcagtttattataacggttccgggtgataacaggtattatctgcccgtcctgaacttcccggatcataggaataagcaccaggaaaagccggtgacttccgatattgtaatattcatcgaacgtttccttattctgaataagaagccggtttatagcctttttcttaatgccgttcatccagaaatcaaatttttcgcggtccattagctccaccaacgcgtctacggcttcataagccaggttccggatattctcttcatccttgaactcctgtaaggcggtcatgcccgtttcattctctcccaaatgtttaccacgtccggccgttccgtgttgtgcgtccaaagtgggaatgacctttaaccaggtaaacatcgctaccgcctgctgcatcagccgcaaagtttccgccatgccgtccggttccgtaacgtccgcatgatcttcacggtaatacttatctaccgcgtctatgggctccgttccgatgatagcctgtaaatcccgaatacccagcggtaagataggttcccacttggtaaaatcaagatcattatcgatcaatcccaggacacggactatttcaccggccccgtcaccgcctttattaaataacttcgtcatttgctcggtctctttttaatgtatatggtttccaattatcaaaatcctttgtgaaattgtttatttcatcgtagaactccttataaaagcgggccagcccggtatctatcgttatacaggtttgctccgtgcgcggattggtgtttatattggccgagctttctattacaaaatcaaaagcgttaccaaaaccggccattactttagcatggttacggaaaatacagacacgtgatccgaaacgttccgccaccttctttaggtataaataaacatccgcgtaggaaccttgaaagatttcacctacataaaaatccgcgcgccctatgtcttttctctccagccatttctccacctccttgacatcggtaattgccatgcaccaggtagaaatcagaacatattccaacggttgttgcttcacgatcacacgaagataagtaaggctgtcaacgtccccatgactgatacagtgataagacgcccctttctcaaaatgccagggcaaacactcttccaggtgcagctccgattttactcgccggtcaaaatggacgtttttcgtccggcgtgcctttatatgcttgtccgggctatcattggcccggttctcttccggttgccggtcgcttaccggttcttccggcacatcttccggtttcggtgtgaaaaacagactacgcattttctttcatacggttagagggtgaaacgttctgttccgcttccactatggtacgataaagccctactttcgttgcggtacccggaaagttggcattaatatactgctgtaacggtttacaaaggatcatgtccggaatagccgtttcggaagcgttatacactttcaggctgtataatttttccgatccggaagaaagcttgttttctataatcaggtttgaaagtaccggatcaagaccgaagccggaagtggcggcagcgtccgccttattggatatcttaatctgggcgtccacataatcctttatcttcttatccagcggttccaccgtccagccctcaaagttattcgcttccggattccagaatttggtcgtgtgcatgtatttcccggcgttctgccttccggtaatattggaggcgaatttctccatagcttcgtccttgaaatcttccagcatctgggccgtgtatttctcgcccgtacgctcgcaaacctgttttatacgtgcttccgcgcggtcccagtaagactgcggcgattcgatatgcagggaaatggccgaagcgttttcattataggcgatcaggatagcggccagaccgccggcaagctccagccagtcaagcgcacccagaaaacgcggcgtactcatgaagtccttgcaaaaggaatagatattatagtatttcacggaaaccggatatttgaacgggtgggccggatcaaagaccgggtaacggtaagtataagccggatcaggataaggaaagtcgcccacaagtacttcctgcggttcatcctcgccgtcgggaggatataccaggcgggccttctgatagggaatatgttccagccgtaccaaacgcccgggattgcccacacgcggcgcacggttccggacaaactttataaaaaagccctgcatgtgtgttaagtctacgagtgagcggtgaagaaccgttgtgtaatcccacgactccaggtcggcggttatttccggatcgagtttccaacgccggtaaaaacggttattgtcttcgtcgattgcatcctcatacagccgcgggccttctccccactgcaaaccggctattttacccataatgccttcaccggcgtagaatttatccagtaaacgcatgacctcgcccggcatgtcgttattgtcacccatgggaacgataaaggtaccgtttacgctgatcttccgcgaaaagaaagccccccgccggtttaactggatgctggaaggttcccaacctttaccgcggccaccgatagaaaaggagatcaaacccttgtcggtgccggtatctataattccaaagttgccacttcgtcttatttccataatcttaaatcgttattcttttcccgttgaactccattaccagacattcccagcaattcagcggccggcctgttgtggtgtccgtcaggaatagtttatagcttgaattttcgatgctttcatccgtcgcctttttcctcaaacgggcagccgtgagtatcaccatgtcgccgccgtcccgtgtctgccggttccatttccggaacttgatagaaaaggttcccccggaaatggtaatccgcttcatctgttctaccgctacataaaggtttattttttccatagccggcggataaaacttttaatcctgccccagttatcatggaccaggcaaaaggatagaaagaaaaacatgaattttaggaacgtccataagctacacccgtttgtaaccttttctttttcctggctttgttgcttaacgtcggatttacgggtaacgactgtttccgcttgactggtagtttccttatgatcctggaaggaactgctttgattctttccagttcttttttcagtttttcggttgctgaaatcaatttctttaattcttccgaggctgtcgtagttgatacggatatgcgtactatcttcccggtaaacgtcaagtacgtgctcctcatggctcgaatctctccgcgcaagttcaataactccgtcagtagttgtttgtttttcttctccagttgcttctgtaaccgtttttcgtgtaacagagcgaggagaacgacaaccgtaaaaacaagctgcaaaacaaataaaaataagtaggtgtacgattccatgtctcatgtttattaagtcgttaattattattagtatcaaaagtgatagatttacggttcgggcaattcttcacgccgcaaagaaacggcttcatagtgtctattacacgggcgttctgcttgatagccttttccatttcgttacatttctgcaggacttccttgtacttgttatccacttcgtcaaaccgttttttctgttcctggtatgcgttctttagctccttacggtcattcttcatatcttctattagttcctggtaaacctcttgtactgacttcatggcatcagcttccgcttgtttacgggtatatcggagagtgaataaccaggtcaggccacccgtgcaaagagccgtaataatcgctgtaattatcgtttccgtcatattgatagagttgaaaattctacattatggtccggacgatacatacatgcgtcaaataacccgccacaatcccggccaggtccgccagaatatccttccagtcccatttattaccgggtgacattttatccccgtattccttacccaatgaagcacccagggcgaagggaacaccataattacccaacagggcacatatagcgtaattaattccgaaatgcttccatttgtcagttcctattttcataatttgaatcattggttatactgcaaaggtgggaagaacggaaaccgacgaaaaggacataaaaaagagtgccgggaaccaccccggcacaaacaaaccctaacctgggacttaaacccaacggctgccttttcagccggtatgctaaattgttaatattaaggattagacaacttttcgatgtcttttttcatcatacgtaataattgaatcctccttaacacctcatttgttggtgtactttcatctcctttctctattaggaaatcgattaggtcctcaataacttcgatgtaacaagcggaaaccggttccgtcttagtttgccactgtgtcaaaatctcggcactttcatctgttatatgtgcgccgtttacttctatatctttcataataattctttctttaaatgtttttaatcggtgtagtctctaaggtagtgaaatcaattattccggcctgccggtatatcccgagggcgactttcctaaaccgttcgtaattacgtctatcaatgggcgataactgccacctcttcatgtctttcatcaaatccggtatattattagcactattatacatacagttgtttttaccgtactcgtgatgaagtgatacagactgaaaatcaccggaaaaaacaaccaaccgtaaacgttcaagttcgaggaaagcaaactcattgttaaccttctccaccttgtatgctcttagttcaatggaaggcgcaccgtattcacgtctaacgaaaaataggatatcagaattatttgtattcatttggcacctccttttaagtcttctaatttaatatgtgaaatacttgttatactttccagtaccccgtcgcatatacttttaacccttaatccgcgggaaccgtcttttttgggtaaattcaggtgataatacgggcgattcctccagaatgtaatccggaaaatccagccacgaactttaaaagtagcattacttattttataatcaacctgtaccagatcacccggtttaaatttactttcttgtagaaacatcccctgtatttcttcctgttccttctttatttcctcaattcttttatcattgttttgtaattgggtaagtaacacttgctgatattcagtatatatcattcggcacctcctttcttttctatctggggacgctctgaaaacctatatattcttttaacccgataaatgaaaaaataggctacaggcttgtcacagccgttattatgtgttttagtgtcctgatctatatgaataaacccgctaccggaagatattttcagcggcattgttttagggtatttctcgttcagctcctttacctttgcttccagttcagttttaaaagcatcaaaggaaattttatcagggcaaagcgtgttaccaaactggtttgcaaactctgccatttcagcacattttcgattctgtggtttatattcgttaagctctataaaataagatatcattttcggcctcctttcctcgctttcttggcacgacacacacatataactgcaccaatgacagccggtggatagataaaagtaagacagaaacaagcgatagcagataagtaataagccccagaagttgaacaaacagtacattcatgtttcggttcctgaaaataacgatgttggattgtgtttacgtccgtgctaccagtacggaacgaaggtacatagcttgtaccggattgaaattcatttttcataacggtgttaattttgactattttacatgggaaaggcggttaccatttcccctaattcgtcaaaattaacaccgcaaaccgtccgaagatcgggttataagtttagggaaaggcaaccgccttgtattaaacaagcacttatcgggcataaaaaaagcccgttatttattcgagccaataaccgagactcaccggaccgcaccagcggtgttaactttgacaggggcaaatgtcggcattaaattctgaacaaaaaaaaaaaaacgttaataaaagtttattaggaaagaaagtttctcgactctacgattcgttacttcgtaacaaaaaacgcccacctgattaagggtgagcgttacacactataattaatattctatttgtcttttaaattaattccctcttttatctgttcatcagaagttacctttttacaaagaatatagtgataaacagggtctttgctcattccttgtgtaggtgtaaccggataagccagtattagttcccaacccaatttagccaaatagttaacggcgtctatcattgaattaaaattcatcttttcaccgttttcatctactaaaaaacgagcatttggtgttgcccattttgccttctggccgaaatctacttctatttttacttttgtaccggttatatttccagtacccacgatttcacaataagccttatacggttcttgtgcaatggctgccattgttagtatggccaatacaataactaaaaaaaatcttttcatatcagtaacttaaaattagtgtgtactttagtttgtaccacccgtaagtcctgacggtatatatgcagtgtaattttgacgattgcaaaagtacttaaatatatacatttataaaaaatattaccccaaaatcaatcaaaaatgaaaggcaaccgccccaaaatacacggtaattcacccaaaaatgggcaaaaaatgaaacaaaaacgcataaaaaacgcgctttttcgcgtaaaattttggtctaaatgcagataaacaactgaaaaacagccaaaaaccaaagaaaatttcaaaaactaaaaaaatgacaccttccgaagaccgagccgctcagaagtcggaaagcagttgccctccccctaaaaggtgaaatatgacctctcccggaggggtacccgtaacctggtaacacaaaaaacgccggaaaaccgattttccagcgttacaaggcaattaccttttatgcctgttctctatccattgatccacaaacgagtcggcctgcagcgtccgcttgcctcgtactaaagctatccagccggggcgcatcagtaagtatttgaaagcgtcggagaaattggtggataacatcggtagttttttcggtgccagcttttcggacttcttcaccttgaacactaccttagaattaccccggtatttgatttcagcctttgccttttctacggaactaaccatttctttacagttcatcgcatcaaccagcaagataggcaggttcttgttggtaccgcccataatctcctgcataaagtcgtattccgtatcctgccggataactgcctgtttgcggctctttaggtttacgatccagccggtacggtttccgctaccgtctttttctatggcgtctttgatcttacccgcgtaatcctccttctgtttctcaaagttattacctgcacggtcatagtacaaatccagttctttatattcgtggttctggaagaaagtgaggaactggtcggcgatctcccggaaccagcccggcggtatctcaaaaaagttcttatgtacccggtaataagcaccgtccggctgaccgatcaccaaagaaagcatattaccgaagtccataccaccttcaatcgctttatcatggtgcaggtaccggagctcccgcgagctgtaagcggcttctccggacatggtaccgttataatacttatgtccttcaccaaacaacacatagaaacgtaaatccctgcgaagaccgggacgcatacccaccaccgactttttaaattcgtgaagctccagcgtaccattatacaaccgctttaaataatcaatcgtaagtatctcaacattagcgaatgaagaagcgttaagaaagaacgtttgtccttttctcaacttcaacaaagcccggtcgtaatattcaatatcccgtttcaaacgtttcagtttcaaaggggaaggcttattttttctttcttcttttaatagagaaattaccaggtcattacgcatacttgccgcctgtactattttaatgatccgttccgggtccatttgcttgacataccggaaaaaccagtcgtactcgttttcgtcgatatccggcatatcggtagtaatggttatccccaggaataaatgggaatgtccgtaagtgatcgcatcaccgcgaagaataggcatagcgcggtttactttcatttccttgtcgtacttcgcttcatcataaaacagatgtattacagactttccggcaagcagtgaagggttatccagtgatcccatgaaaataacacatccgttccagaagctgtaaacatgcttgtaatcatccacgataaccgaacatttacgccgccaggattcaggcgggcgggtatcttttacatagtgtaccccttcgatcaggcccataagctgccagcccttctgaacggccggcattatattatcttccaggttactgtaggtattggcaacaaaagcgaacgcaccgccgggcatttcttccacacaacgggcggaacgcctggcttgtataacggtcgatttggccataccgcgcccgtcaacagatacaaggatagtagtatcgatccagtccgtcagaacctggattatatggccgtatttgatttccacatcatcggcgttactcaccttcgttatcttccccgaactctttgatatcatacaacatacgttttttcaggtcaaaagctttaatacgcgcgtcctcttttatattatcacgtacaataacaggaatttccgggatcgcgtcgataaactcttccagttccttacggtcgatttcaggaacacccagatccttacggctggtagtataaataaccgtgcttttctgtgaaagcagttcctccggtatttcggcctgttgatccttataacatccgcgaagttccgccgccagtttcagcaggttcttagcctccttcacatttcccataagaaagacggtattcgcccagttttcggccttttccgcatacaagttagcgaaagcctgcgggcgtacgttatcctgcgtataaaagaaattgagactgtcagcgtacacctggcgggccatccagtccgaaaggccgtaaggttccgacttcaaaaggcggatgatgccggcctttgtcaccagcttaccatttatacgcatacgggcacgaaggccccgtaccatttccataaggctgtaatattccctttcatcgggcgcgagggcttccagcgtaccggtagaaagaatcctttgaatctggttgatatccaccttgtcaaagtctattcgtgagggcttaattaaattcgtcgtcatccatttgttcgattaaacgttcgaaagtatgtcttttccgtacggcctccagctgttttatagcttccacgtttccgtcttccgccgcttcatggagttttatttcaggcgcggcacgtgctaccagaatcccttcccggatcaggaagttaacggaagttcctaccgtttccgcatcccggacaaaaagcccggcatcctccaaagaaatccccagggaaacggctatgtctttcggcgaataccctaaagaagacaaacgccgtacatcctccttttgctgcgcatccaggtaaatactatccaccaccgttaaatcgttcatacgcatcttttattcgtttctgtgccgtgaaataataaatttcgtcctgttccattaatacaaagttccggccgctttcaatggctgccacggccgtagtaccggaaccgccgaaagtgtccaggatcagatcgccgggctttgtactgtcttcaatcagtttacggatcaacgccaccggtttctgtgtgggatgaaccttttcaccttctaccagtttcgcaccggaagcaaaagaccggatattatctattatgtttgtggcaccgatagaaacaccctttccgcaatgaaacaaaataagctcatgtataaaggcgtaatgattacccgggcccgaccgtttgttccagacgatcatgtttgacgcacctaaatacaagtcaaacaacggataataaaaagcatacccgcgccagtccgtaaaaaagtacacacaagcaccgggtttcttcacccggttaaactccaggaacaaatcccggtaaaagggtttacagatagacaaatctttaaaactgcctttctgcccgttgtgtgtcattcccaggaaataaggcggatcggttattatacaatctacggaattgtccggaacacgtttcaacgcctccaggcaatcctcgttatatatttggtttgtaatcattggaaagttgtttaagccggctttcttctttttctatccggagggttaatgtcttgagctggtgccccagctccgagcggtcgcaagggtgagagaaacggcccaggttctttgtgatccgttgccgtttccctgtcagactggcaataagttcaattactttttttttcgcgcctcaatttcttcctctatggccttctgtgtagtttcccacttttggatcaatgcaagggcactcgctttcttcttctcatcatccccggcctgttccagtttcgccttattctttgaaaggttggcgcgggcgttattcagtgccttttgtatgtcgatatccgaaaggttctcgacgcccttacggacggacaaactttttaccttctcacatttacccagaatctttccgttctcccggtaatattccagttcatcccacatctcgcggttagcgatgaagttttccacaaccgcctgcgcttcctgtgctgtagaaagtgaactgacatcatccggcgtagcttccaggcgggcgaaagcttccttatacttcccgtatgcggtgaacatgtcggaaacaagtattttcagaatgtcgggacaatccggagaattcaggaaggtaaatttctcgcggaaacgtatcattttggttacggtttccggggctgctttgtatcgtttctccgcctcttccagttcctcttccagctcttccacacggtcggcattttcatccatggaaagaaccttatcccggaaatcggacgaaacgagttcttccacactgacgccgaaagattcggcaagttccagcagcaaatcatcgctgtattttaccggcgttttggatgtttcctcccgggcgggttccatttttaccgcggtcagctgtttggagtttcgccggatcgtcttaaattcacgttcagaaagcccggccaacttccgtagttcctctaaaagaatggccttcatcgtttccgtttctccctgccggcggaatgacttctttaacatacggttgataccgtatttctcgtacagttccacgccctgaataaagttacgcggaccggccagataggtaataatttcctgtttcatactatataaaatttgatgatacaaaggaaaaaaggggcaattaccctaaaaaggacaaagggtggccgggcatgtgctgccggtcaccctttgaattacatgaaagccgtttacttacgcctcataacggctttgttcaatccatttcatagcctccgaaccgtcgttaaacgcccgcaacgtcagttgggaaccttcggaagcggtaaacgtcttaccacctttcagaaggaaattaccgcccgcttccaccgtaggcgcaacacccgaacatcccataagggtaattaccgagccgtgacttccaccggtaacaccggctatcttagccgcacccgcggaaagctggtactgcccgtccgtctggtaatctatatccgtggctccggcttccaccacggccaccggttcttccagagtgtcggtaccccggtaaatggcgatatcatcccctttgctgatctgggtgaaagtaagttcgttcgtattcgattcattggaaccggtataagaaacggataacttacacgggttacagggcgttccgatcagatcggcaggctttccgctacaataacggagcacaacgatacatttcttggacagccagtttgtcttaaactcgcgaatttcctgttcgttaccgggatgattgaacttaacggaaggcgtataaccttcggcgtccgtttccccgtcactgttggaactgatttcagcggtaccgggtgtcaggtaaataccgatcgcgtaacgtcccgccttcattacgatatcatcctcgataaccacgccggcatcgtttctctgcgggaaggaaagaatatcgtcaacgtcgtaaattacgagctgatccttgggctgaataccgttaccgggattgccggccggccttcttacgcttgcttttacgtatgtcataacttaatgatttataaggttataaaatggaagggataaagtatcccttccgccaaaaattagcctcttgccacttcgtagaatttaccgtcggcggctttcgccagcttgataaacttgccttcggaaagcgtcatagcttcggttaagacaaagtttccgccggctgcaatggtggaagcaaattcagaaccgcttccgtagatcgtgtaaacgacaccggcttccgcatcggtaaagttagtgattgccgttgcctttgtattctcaccggttacgaatacttcaccgtcaagcaaagaaggatccgtttcatccggcgcaaactgcaacgcatcggaagaagcgttttcgcggccgatctcgataaatttaccgtcggcacgtttcatcagtttgataacatcccccttacccggctgccaggtagcggaaataaggtcaaattttccgcttttctcaatcttaacgcctttatccacgcttccgcatttcagggaaataaccgtacctaccggcgcgtcttcaatatcggtaatcgtaaattcggctgtgttcgctacggtaacaatggaggtatgaagcttggccgacgggttcttgtccttgtcagcgtccacaaagtaagacgccgggcggtcatactcattacagaagatcatctggcgcgtatagtccatatcttctttcttggtgtacttgaagcccacggcaatagcccagatactttcacgccagttactccatactttcaggctccagtcttcctgctccaggttgaaagccgtcatttcgcctggtttgtcctcgtaggttttaatgttgccttcaaacgtccagaaaatacggtggtggttgtcagcattgggaaccgggataatctttaccgccggatattccttcacatacatgatattagccttgtaatcctggttctgtccgtaatgcagttcattgtatttatgatacaatacaataaagtgcgaaggcatataaagtgccaggttaccgctgtcacgaagaaccgccgggatcatggaagtacccttgtacaccttttcaccgatgtttgcttcggtaagttctcccagctcgaacggtttaatctggtaaacgaactttccgttattgatatcggtatgtccgttcactttcttgttcaggaactcatacaggccgtcagctgcagcaagtgctttgcccggttcgttcagattcgggtccttacggattccgttaatacggcgttgttcacgctcgttatgcaacttcttggcggtttcggccaggatgtactcgataaaagaccacttgatagggtttgaaccttccttgttcaaagtgccgatccaggttttctccagggcctttaaatttttgaaacggtgtgcaaacatcacgttgaacatgcgcagggtttcatcgtcgaactcgtaggaacctttagtcaccttgtcgaagtcggattcctcattgccggcctgtgagaactcgcccagccagatattaaccagcgtagccaaatcctgataaccggattcaagcgggaaaatactttcaatggaaggaagttccattaaaaacgactgcaaacgctgttgccagggaatacgataaaaagccccgaggtcttccttcaaacggctgtagtcaagggaactggctttcggaagagcgatcatttcaaaaccggcagcctccattaacgcagctttggcgcgaaggttatacgggcggtccagtgagaacatttcaccctgcaagcctcccagctgcttttcgtcccggagattgaaagcccctttaccgtccgcctgggcgttgtgctgcttccctttgcccggatcatcttccgcggcggctgaaagttgggcgataataccggaaagcttcgttatctcggcatccttcttggcaatcagcgcggtgttgttccggttttcgtcacgctgttgcgtctgcaaggcttcaagctgttcctgcgcctgtaccagacgggcggcagtatcacccaacaaaccgcgaaggaaagcggtagtggtaggttcttcggttccctctccctggtttccgtcttcggcttcgtcctggaaatcgttttcgagggacgctttaaagtccgtgaggaatttttcaggaaaaccgtagtttttcagttttgccatttcctcggccgtgatagagttcttatcctctaccttgctccattccgacaggcccaacaagcccagcatgtgagcggataagctcttaaaatccaatttcatatatacaaaattttaaagttaatactatatgttatacatctcgtttacttttctgacggtgacctgtgccagtacccactttaccgcgtcttccagcgtaccgaactggtcgatatagccgtttgccacggctacgtcaccggtgaatatctgtccccggaaaaggggaagttccggatcataggcaatacccagattccgactgatcgcatcgcagaaaatacggtgcatgacggccagacgctgctttataggctcttcgttgttctccttttcaatcgcgcgggtttcatagtttttcagatcggcactatccggatagatttcccggtaatcaatgccctgtttcctgaaatattccttaaaggattggtaagtaagcatgataccgacggaaccgacttcacacataggggaagcgataaaggttctaccggcggcggtgcccagccagaaatgggcactacccatggtaccggccacgtaggtggctataggtttggaagattcggcaatcattttagccgccaggtccacatgtgcgaccataccgcctggaccgttgatccacaggaccgcgccgcaaatcttaggattatcggaaatatcacggagctgcttttccaggcggtaagtctcccaggaatacaaggtgccttccaggataatgacggccacactgtcagccggcagggtgtcatcatccagttcccaccggttggcaaggtaaggcgtagtagcgtaggcggttattttattattgtcgagccgtttttcgatcgcatccaggttgccggctgcaacacacggcacaagtaaggaaagcaaccggtaataatcattatcagcgattgcccaaggtgctgtaaaaatctcctgtattttgtccacgttctcttttttacggcaaagaaaacgcctatataataggtagagaaggactgaaaggaacctacaggaacgcatcaacgcccggacccgtaccggacagggtgcagttatacaggcccccgccgatctcaaaagaaaaggtaagcgggtaatcgggagaaccggaaacacgggtgttacccgtttcgtcagtatagagggcgacaaagggcgtcgctttcagattttccaggtaaagcgtcttattttgcgacacgtcggcaagcttgaaggtatgttttttagtatagacgtcttcatttttgctgtcacccggttttaaggttcccggtacgatcataagaatatcaggttttccgatagagcggataacgactttcgagagcacgacgccaaaatggataatgttgtaaacgggaaccagttgcaggctatgggcggcggatattaactttcttgacataattacagatataaagtattgataatcaaacattcagcatttttcggacgtttttcagccaaaaaccggacaaaaaaggacaaacagatacagttggtaggtaaaaaataacttgcttttttacactttttttcggttatacgcccttttcttcttacgcctgaaactgtcccgccaccgctggtagtttttcagcagcccgtcttcctgaatggaagagatatcatactttttcaggaaggtaaaaacggtttccttaaactcgattccgtgcaggtgcttgttttcgtccatgagttcgtgcagctcggcccacatcagggcacgcagacgcttttcaagaatggcggtaccgcgtacggaaatgtaattgaactgttccggagacttgccgccggcaaaattggcctcccggcggtcaggcagcataaactccaggttgccgcggtcagccggacaatttaccggccgtttctccatgagatcgtaaacggtcacatagatatcggacgaggaaggaaaacggacggtaccgaccgtttcgtcgtaatatttgccccggacatactcggccaggtaggattcgatctgtattcgggtggtaatcatagcaataacattcctttttaaaggcaaagatattcctttatcggctgttggtctgccatttacgggaaaatgtaggctttcagtcgtcattttgataaatatactccgggagaataattataatatgccttttccagccgccacacacccgacattttctctgccaggctgtgctaatataatccggtactaaatttttgtaatttcgtaaccgggcaaccgacaaaggtaaaatcctgtatcttagcaacttagtaacgttactaatttccgttacaaaaaaatggccggaaaacagtttgtaaccgggcttaccggtagaagataaaaaggccggtgttacaaaccggaaaaattcgtaaccgttttgtaactgcaacttcgtaacctttatttcctatttatttatttgattttcagacttttttctttcaagcaaacaaaggttacaaggttactaaaattttgtatgaaatagaggtggggtatggggagggaagccgggcgggacgcatttgtttccatacgaaaagagggaccgacacattcgtatctggtccctcttttcgtattttataccggctccgatccgtcttatacgcgatgtttgcacctgcttaaaatccatttctttacgtccgggggtatatagcggtgcacgacggccgtatagtcctcgttaaattcatactccaggtagttgtcgccttccaggataaaaacacaggccgttttgatgatccattcgagctgctcgcccgaatagcgttccagtgccaggacggtaccgggtttcatacgctccagatagcggtagacctgttcggcgaatttccggaacctctcgccgctgttccagagcgcggtaaactcggacatgctgtttaatttcaaatgcgcgttattcattcatccggtcgttcatcaggtacaaacatgagtgtcggatcggccggttccgttccaccaccggcagccgtttccgccgtgccgcatgaacgcagatagatcatgtcggcggccttgccgtcgttatccttgcgtacgatacgcccctgggagttgcaaaggtccttcgggttgagttcgtcaatgtaggggcaaagggccacaaaacctttgagggcctttgtaaaacgctgcatcgtgattttattcacaccggaaaagcttttgtaatcggcgaaggccttttcacggacgataaaacagtccaggtgctcgctgtccggagagaaataagagttcgcccagtcctcaaagttattgcccatatcggccttgtatttacgcctgataatgttttccatgggcggaagcaattttatagattcctcgcaaagggaaaggtaaaaacggcagcactgcaagaagaaatttatatcggcgttccactcgttctcgctgtaagtcttggaaaacaaatccttaccgaaatcgtcccggatagaacgcgtttcccggtagtcgttatcttccgtacgctggtggtagtagtcggagaataccaggtacagcaaacgggcttccgtagacggatcaaaatcaataggaacgtaattagttgtaaatcccagcttggccgattcctcgaaaggtatagtaaacgactggttgttcttcgggttcacggtcatatctgacgtgatgatgtcgtaaaacaggcccgtattaagataccggtcgcaatcatccaccagaataaagtcggtatgctggttcacctggtcgaacacatgcggattatccattaacttgggattacggccggaaagcttgacgctcttcataaagtaggaaagggccttgaacatgaatgatttgcccgaacgtccgttacattcaccgtcttcaccgatcttgttatccatggcctgtggtgcccaggcacgcgaaggggatttgtaccgatgcagcatataaccgatagtaaatatcttattgataaggtttcttttctgttcggcaacttcttccgccgtgaggccttccccctcgatatcgaatttatgtttttcccggtaggattccgcttcccccacgctcttgtcgtcgaaattgtattccagttccttacgccagtaaacgcggctcgaattgattacatagccgaaaaagttagacggtacggcatttatccggatatcaaacacatcgttgccctctatgtcttttttacgggaaatggtaaacatgtcttccataagacggactttgtgtttcagtacgttttcttcccaaacgtagtgggacaatgtgctgccgttggccggatgttcctttataccggtaccgcttacctccatgctgcaaccgggaaagaagaacatctgcgtattatgggtataattggtaaagtccagttctatttcctgcaaattgtccagggccgtatctgacagtttggggctgttcagaataagattccttatatcgcgggataaaaagttctcttgggcccactcacggataaacttccggatatcctttgcctttatcagttttacaatattgccggtaatacggatgtatttcgttgaactggaattttcatcatgaagcgaatagaaaccgttaagacgtaaaaagtagtgaaggcagtccgcgtctatattgtgatcccattgccgggatttctcgttaaacttggaataccagaatttggcgggcatggcaagcgtcataaggttacggaaatcctcgttcttgcttcgtaattccataaagtcccggaagtccttacggggtttgccccgctgatcccggtaagtggtaagccaggccggtagccagatcgtgtggatatcgataaaacatagtgcaagttccgtaccctttaccctgcccgtcgtgtcgatatcgggtatgttatacaggacttcaacgtatttcatgatctccttgtagtcctgttcggaaagtttatatgtttccgaattaaaccagatcggggaaaagcccagcgatttaacgcacagggcgtcgcgctctccggaacatataaacgcctcctgcagcttctgttccttataaggcttttccgcattggccggattctttttaaaggcggcttcttccctggaattaaactcccggtataaggctttcagttcggaaagaccgtttatatagtccttcggcttgacaccttccggggtgtaggaaaaacgccactgcttgtccggattcagaggctcgtatattttatagaacttcacttcgggcgtgtcgccttcggccggttttaccagacattcgcgcataaagatagggtatgtcgcagtcgcgtatttataggttacctcgcgattttttacataccctatatatttggccgaataccagtgcagagcctcggcgttctcctgggtgacacgggggccgagtatgcgtaactgatccggggtgagatgatcggcaagctcgaaaattttagtaccgtctttctgatcctgggaggccggaaccttacggatatccggcttgtttacgttacggttgagttcatcggttacgttgtacatggatgcaagtttaaggatcgcctcgttaaaccggaggccttcctcatacatgcagatatcgacagggctttgagccgttccggtatcgccgaaatccgttaccttataaacctgctgggaaccttcctttccgaatagcttgatacaggccgacgcgtcgtcttctgacggccggcgtttgaaatggcggttggttccgacacaatcccgggcttgcggataataatgtagaataatatccagcccgttgttggttactttgtagatgtcttctgcctttatcatcgttataaagttacatagttacttatttttcgttgttttcctcctgctttgttttcaagtctccccaaggttgatacaggaaaacgaataataacagccaaagaaaagcggttttacccgtataataaatgacaaaggcaatcagtcccataaaggcaaccacgataatagcgtgggcgatgtattttaaatttttatctttcattgttcaaacatgttatactgaattgaaaaaccgaatttgcttaatctcctttcctggagaagggaacgtttgtcatgtgaaggcataatgaccaccaggttctttgtatcgaactggtaacctttcttccgcatctgataacgtaggtttcttaggcgtctgtcttctttcatggcatttcgttaagatcgtcttagtttatagaaggcatggcacactatcacaaaggatagcgtttaaatcctcctgtatggtttcctgttgcttcttgttcaggtgtaccaggaaataaccttttccgtcggaaagattctttatttccgccagattatacttccggtccattgcatccacgaatgcaggggattccatggggcggaagctactgaatattttataggttccactactgccttctattcgtaacgtggttaattcatcgggggtggtaattgttgatttcattgctgtattatttttagaaaagtccacataaagtgtaaaaaactgatttatatttatcgctctttcttcttttgtattagaaagatacacccttttatttttcttatccatttttatttaatctcttgcatcagccatttttcggcctttagccgttgccgaatagatattcggtttatcacctttgaaacatttagtctttatccattcatatctttcagcttcccggagataaaataatattccgtattcagatgtatttttcaaccaatctaatttcttgatttgctcaaatgtcataggaccgccatatacaagcgatgatgttaacatctgaactctttctttcaatgaatattcactcatatttaatttgttttactctaattgattcttacatacttgccacttatgttacaagtttttagtatctctgcgttttcttctccaaaagcgatcaaaacagcaccacaaccaggcgaatccccccgtattccgtccggcctgaaaaaacgaatccttccgcgtagaaatttaattgccgttgccttctcaaatataatatcctggaacatcttactatcacagcggttgaacaacagcgcaatgccattgccgtgttgtgccagtttacgaacaaattgttcaataagcggacgggaataaggtggatttaaccagacacgacctacccaatctttagttaatccgtcatggtttttgttgtacatggtttctgccgtttgccaaagcggtttaaccggagcacatggatctaaatcaaactttcctaatgcgtctataatttctttgggtgtataccactcatcagtggtattagccgatttttcaaaggttgtattcatatctatcatgttatgaggggttatacaattcatatccattatcccaaagactatcactgcgaaaattgaagaaatcttccaaagagatacgtacaccatcttctaaaagaagaaatccgttttcaatagtcatccattcgtcagaggaaaagaaacggtgcgtaaccttcttaccctctttcattgcttgtatagcttcttctttgctcattatcttttcttgatttgaattatttttcaccacttatttttaattttaccaattcaccaataggataggtcgtatgtttcggtctgtttattttcactttatgagaagaaagaaacaacggaacaggttctattcgatagaaagtgtagtaagcttctttaggagctgttttttcatattcctttaaatattcttctgctttatttctcgtatcaaatgcggcaaggatagaaaaccaaacgccgtcttcttcgtatattccggattcccttttagttactatgtaaattttgctcattgttgtttatagctgtgccggaggatagcatcgaactaccaataacacccgctttcgcccttcggggttatctccacactccggcggttattatatggagcggcaaaagccgccccggttatttattcacttttcttttccggaagaaaaacaaagtctgcccaaatatcaaggaattgtcgaccgcaatatgctgccagttccgacgttttgaaggcaagccgaacgccgatgagcgcatacgagtacgatgaaacgtaatacgcgtacgcatacgaaacaccgcccaacgcgtacgcgttgttgaacgaccgatacaccacacgagacttttcttcctcgtccaacttattgtattcttcccctgtataaagaataaaccaaggataataacggcattcatcctctgtaaatcgaggttcccagccttcatttaaagctttgacaatgatacggagtttcagaaaagccaaaacgtcaggttcaagaccgagggatattttatctcggttccatgcttctgcatcgatgccaatttcatggcaggcgtcctcaaacgtcttaatacgttttcttacgtctttttctggttcatcaataagggttaagattccatttctccagacagctgttttaccttccggaatttcgatttctaatttctttgatttcattcttcttttatttattggttttcactatggaagatttttacgcctgttacttcctcgatcttatcctttgcaagttcgggaatacgacaacgactacctcgccaattacgaaaggtatgtaatggcactttacatgcttctgccaatttaagggacatttcagaagattcttttaccggcaaattcaaaaggtacattcttagtttctcgccgtcatcattcctttttaatttttttttcgtcatacctttgtgataaatatactcattattgttaactttacatagcaaaggtataattatttttaccacaggtgaataaaattcacgttaataaaagttataacaaaggtgtaatatggctaattttttgttaataagagagttatgtgaattaaagaaaatcactatacgagaacttgcttcacgtataggaaaagaagatagtagcatacaggctattgttagaaatggatcaacgaacacaaaaaccattgaggcaatagcaaaggttttagaggttcctgtaggtgtattctttgatgatattcccataactggaataaaatcaaatgaacttgataaagatgcaaaaatagctgatttagaaaggataattgaggagaaggaacgtctaatacaagtcttattaagtaagaaataacctgtaatagataagaaatgtaggcatattgtaggccatacgtttatacaaatgattaataatcaggcgattaaagaacgttacttgaatcacttaaataaaacgctgattatcaacagataattagcgttttgcttttctaaaaaagttcatttctgaattaaaaaaaacaatctacatagactccctattctaatctgtatttcacaaaaaagatcgttcttacatcaaaacagaactatcttatgacataagtatactgctgattaatgtaaaatagccactcaaaaaaagaagggagagattctttttcacataaaattcattttaacttggtgcattaaattataaagtatatatgaaatattcctttgataatttggagaaggttctgaaaatgaaaaaggaataattcctgaaaatacagttctaagctcaatttgttggcgtaaaatttgctaatacgtggttttgtgtgttcctttgtactatatatttgcctcgtcaataaaggaaacatatacttccgctaaagtaaagattggtaaatattttatggtagcaatatatagcgactctaaaacaggatatcattggctatattcaaataaatatgcttgtcaatatgttgacataccatatcgatataatccatgggactattctgtagttttcccatgtgatttgcataattatggaaagatagaatgggtttcatggaatcaaactccttatccatatgagtttgaattttcaaaataggtccatctgccgaaaacatttaaaatcagcaatactcatttcaaatcggactctctataaaatagagcaatttctcaagctctgaaaataaaatatagatacctctaacactttactgtatctgtttcaaattgctaataataaagcgatgaattcaaattcatcgctttattattagccctagatggaaatatttcctttactcttttgtattctcatcccccactatacctgatgaagaattatcaggagcctgatctatcaaatccataaactgatccagtttaggagttataataatctcggtccggcggttacgagcttttccttctgccgtatcattaccggctaccggattaaattcacctcgaccggcagcagtcaggcgtttgggatttataccataaatattctgtaatgcctgaacaacagatgaagcacgcaacgcactcaaatcccaattattacgtatattcgtacgagatatcggatcggtatctgtatttccttctaccagaacatcataatctttgtagtcctgaatgattttggctattttactaagcacagcctctgctttattgctaatttcataacttcctgatttataaagcatgttatctgctaaggaaatatatacaacacctttcaataccttaatatccaagtcacgcatctcttcacgggtaagcgaacgggtaagtttattgaccattacgagattcaaagagtctgatctattcttttctttaaccaaatgctggatgaaacggtttgaagcattgatctcatctattaacttacccatattcatattcccttgagagctctgtgtaagactcttattcaagatgctttgcatatcggacaagctcttgcgtaactcactattattccgctgcgcttcggcaagtctctcctcaagacttgttgaacgtgcctgattttctcttagctgcaattgactttcctgatattctttttgcaactttgtataatcagtttttaaacctttaaattgcttctgacttacacaactcgccaatactatacatcctgtcagtactaacaacggtcgaaaaagattcttcataactctattattttaattactaactttttaagtgaccaactgcagccgtttccacaacaattgcgtaaatcggttggttatgaacacatttatcgagataaagctcgaacgaccttataacatttcaaaagaacgaaaagtttagtatgtaaataaaatctgtttttatcagagtttgatccatcctgccaagttatccaacttaattttataaatttgcaccatactaaaacattactgcgtgaaaaacaaacgttggatttatttagcaattatttccgcaattatagtgttaggattggcttcccgaaaacatggtgatatattgcccgaatttatcgcagagtattcaggcgatacgctttgggcagccatggtgtattgtggaatacgctttcttttcccgtcattatctatactcaagaccattgttatttccttattattttcttattgtatagaaattagccaactataccaagcagactgggcaaatactgtacgaaacaccacacttggagcattaatctttggacatggttttctatggtcagatatgatctgttatactgttggagtatcattatccgctgttatagattcaggaaggattattatctcccaaaagagaaacccctagaaaaaaagcactgcaaacctactttgtttacagtgctctttccgattatcatttaaactacctatcacaatctacaatgaaaactatcgctcaaaggtaacttcttattagtggaaacaacctttatttcattttcaccaggttctagttccacatttttccattccagaatagcatacgaatccggtattgctttaccataactcttaccgtttacaaacaattcggctcctgacagattcgtgaaagcagtaattgtttgcaaacgttgtgtacgtactgtgttacgtttgcctgttaaataaagcattggttcttccctattccagttggccttatagaagtagaaagcatctttacgaactttccggtcgaaggtaaccaaacctttatcattaattccgggacggtctccttcagtgcgatgtgcagcgccaaaatcaaacatattccagacaaagctcccccatacataaggacgggaagagattgttttccagttttcaatgtgataatacgtctgccagttttcaggatgccaccaactggttggtacagttttaaccaacgaatcttgttgatggtaaatacttgcgccggcaccatattcactgatagcaatacatatttccggatgatccttatgcattcgatccaaccatttccccaaatcagcgggagtgccaccataccatccatcataacggttccaagcaatagcatccgttatgaaattcaaatctcccatttgattacttgcggaggtcgtaggccgggtagtatcttcctgatgtgccagcacatttaattctttgatgtactcaaccggattatctcccaactccgtcaactcattaaacagcccccatacacaaatagaaagatgattataatgttgacgaatcagttctttgagctgctcttttccgttggcacggaaagcaggtaaatccacaaaacctttatcattatatccaccaggacccacaaaaggtatttcagcccatacaataataccattcttatccatcagatcataaaaataagtagcctgcggataatgcgccaaacgaacagcattcactcccatctccaacatcaatgccacatcttcctcatggtgttgcgggcgcagcgcattgcccacctcactcctatcctgatgacggcaaacgccttgaagaggcaaatgttttccattcaggaaaaaacctttatcagggtcgatccggtaaaaacgaagtcctaacggttgtgtaacacgatctaccatctgaccattccggaaaagagtcacttccgcctgataaaggaaaggatcctgacgaccattccacaaatgaggctgatcgatttcaaatgtaagttcctgctgcattacttcgtttccagaaagattcacattctttgttccttctttcaccaccctttgaccatctaacaggcgtacgttaagctccacttcctgattaccactactcccgtttgataaatcaacaatagcccgcaccttagcataccgatggctcacactatcctgtatcagacgtactccgggggaagcataatccaaaggagaaatacacgtctcatcagtaatcaacaaatgtacatcacgataaatacctccgtaaaaattaaagtcaccgaccagaggcataatatccaactgttcaccattattcacccgtactaatatagagttttcttttccatattccacctttcctgtgatctcaaagataaaagctccatatcccccacgatgctcacctatatgacgacgatttataaacacatctgcaatgttattcactccttcgaaacgaataaaaagacgttttcctttccattcgggacgaataaataaattcttctcataattaccaattccccgtttatagtctatcttaccggacaaagcatcctgcgcattccaagtatgaggcaaatcaactcttacctctgttcccttctgtacctgatgcgaaaaccggaaattccaatcattatttagcaagatatcctgtcgctgggcaaacatcgacattccgtaaagcatgaataaaacaaccgataccaaacggctggactgtaataaaactgttttcatattatttctttaatgatgacttctttattctgataaaagaagataatgattcaaccttattcttatattttttttcatcgacccgattcttgttttccttcccgtcaatccgatggtcaaacaacatactggctttcttcacgtcgcctttcatccattccgcataactataacgccggtcaacggcattatctcctccttcccactgaatatagacttcacctttcgtcttagctttcagattcttgaaaaccccggcaaagctttgcccgcttagctgttcagcgggaacaggcagtttacaaagttcacataaagtcgggtacaaatcaacaaattccaccatcgattttgtttttccttttttcattcccggcacacggacaatcaacggtacatgagtagaagtattcatcagattatgtttacctataaaatcatgttctcccagattccagccatgatctcccaacaaaaccacaattgtattatccgataatcccagttcatccaatgcatccaataccttgccaatctgtgcatccacataactcatacaagcataatatccatgttttacctcccgctggaagtcaatatcactcgtatccgcaacccgtgcatacgcatatatctcgctcgaattacgaacctgctccggcaatccttcaggtcggaaacgattggtagccaaaggtatttcctcccgtttatataaatcccaatatttctttggggcattgaacggcaaatgaggtttccagaaaccacaagccaagaagaaaggtttgccagcctccttcatccttttcaagtcacgaatagctcggtttgcaagtttcccatcatcataggcagtatcaggaacatcagcagattcacaaaaaggtcccctcatcgttttcggattaatcgtttttcccgattccgaattcatccaaagttcccatttattatattccgcccaatatacatcatatccattcggatgattccggtaaggaggctcactccacgaatccgcatgatcgctgatatgatgaaacaccttgccgtccgaaatagtatgataaccattccgggtgaaccatcccgaaataggtattgcttcgggacaatctttgctggcataggcggaaaaactaataaagcgatcggggtaatgaggatatacacccgtcaataaactagcccgggatgccccactcacaggaatattacaatacgcattctgaaacaagacgccacttgccgccaaacggtccatattaggagctttcactacatctaccccgtaacaccccagttcggggcgcatatcatcagccattataaaaagcacattcatttgggatgcatcctgttgtgcacgtagtatagatgagatgcagcaagctgttccacaaaaaaacgcatattttattgatattctatttttcattttctaccttaaattttcaagacctgcaatatactaaaatattacaggtcttgtgcatcatttcaatttaaaattactttgtccataccggattttgttccaaattcgtatttaacgccaattgcttcaaaggcaacggatacagataataatgttcctgccatccaagcggggtatcaaagaaataaacatatccttcatcagcacctgcaccacccgttactttcaaattcttggccgaagcccctgtcacataggcacccagcggttgtttgttaacatagtctcctttcttccacctgcgcaaatcatccaaacggaaaccttcgcccatcaattcaactcgtctctctctacgcacttcccacaaaagagcaggaacggaaggatcacgcttcggatcaaaagcatcattaatatcattcaccaccattttcgccacattagctcttgcccgaagtttgttaatagacttatccgcagcagcctggtcgaacttgttcaattcgcacatcgcttcggcatagtttaccatcacctcacctatacggaacagtggggcatctgttgtattcaccccattcgcgttggtagctacagtatgtgtattataatatttccatacccagaagcccatttgggaagcgttccagccctgtccccagttcatattcttaaagtgaggttgtccttgcacggtgaatcctttaaagttggaagacggcaaacgatgataagtttcaccggaaatcgtagccattaaatctataaattccctgtcctgtgcattatccgtatatttccaatcagccgtactgggtccgttttctttcttcaccatatatggaggacagatcgtcaaatacaaccggtaatcacgatcacggaattgtccatacatattcttatcacccccataacggctagtcgtcgtgctaaccggtcgtccatccgtacaaagataactgtctaccgcgtctttcgttgcctcaatataagattcacctgtacgcaccatacgggtcaaaccatgcattaactgtccggtttcataagccttatacaaaagaatacctgtcaccccatccagtgtttccgaattaaacaactcatcatatttaggatgcacattcggatattgcttaatcacctcttcagaagcacgggcacattcttccagataagtatccgctcccgacaaaccatgatattttctccaagttccttcaaataaagcaaaacgggaaataagagctttcaccacatacatattaattgtatttttcccatccgcttcgatattactgccaatatgtgtttccgcatatttcaaattagacagaatattggaagccaccaagtcacgactatcacgttttccataaagctcgggactttcctcagtcaaagcatgctctacccaaggaatatcaccaaatttagaaagcatctgaaagtatttataagaacggaagaaatatcccacacttctccaatgctccctctcggtttcactcatttccgaatgatcaatattatcgagcatcaggttaacacgacggatataatcataatcccaatctttagactcatccgtagcctttgctttgcgatatgcccactgaccttcatatccatccaatccttttatcatgttatccgattcaaaatcaccacggaaaatttcatccgtttgccctgtatcatacgtatatccgaagaacacgttatacaatccccatgtatacgttttaaagttgtcataggtagtaaagaccgatgcttctgtttgctgtcctttgggataaacctccagaaattcgtcatttagacaagacgacatcaacaaacaaagactaacgcttacacatagtatatatttattcataataattactctttaagttgtgaaacaatcagaatgaaaggtttataccgaacgaatactgtctcatatacggataggtaaaaccacgttgtcctaaatcatccgtgacagaacgttccggatcaagtcctttcggcaagtggtcgaacgtataaagattctcaccactgaagaacacagccaaattattaactccaatcttactcatccacttagacggaaaattataagaaagcgttatattacgaatacttaaatacgatccatcctgtagataacgagtttgtacacgtgtattggcatctgtatttccggccgctttctcataaatacgggggaaataactattcgtattttccggagtccaataattcaactgtgaatcataaacggtagtccaagcatcataatgcggataaaacagatcgttcatcacccacaaatctcgtttaccaactccttgcagcaagaataacagagaaaaaccgttccaacttgcactaccatgaataccatactgataacgccgggtattattaccaatgattttacggtctcccggatctttcgttgtactggtaccactgttgataatatcattaccatccaagtccttatataatatatctcccggattcggattataaccttccactttagcaatacccggtttcagtttgccatctgcatcgaaatcatccactgtgtacaaacgatcggtcacatacccccaaatttcacccagttccattcctacgcgatatgtttcattatcgttcttgtccttgccaaacagtcctgtttcgttgttgtatttagtaatctttgttttcgcatcgtaaagattaaagcctatgctatatttcacttttccgatctgatcgttccagtcaaccgagatttcccaacctttagaacgaaggtcagccgtgttctgtaaaggggcacttgcacctaatacacccggaagttcagagcccggagcaagcatacccttagtatctctacgataccagtcgaacaccatattcaatctgttatccattagcccaagatcgaatccgacatcaattgtcgttactttttcccaagtaaagctattgctaaccaaagcagctggtttcaaagtagtaactttaataccggaaacagtccaataagcctgttccgcatccataccgggaatatatgcgtaaggagtgatgctctgatttccaatattaccccaagaaccacgcaatttcaagttcgaaagaacagagttcaaaggtttcataaacgcttcctcgctgatacgccatccggcggaaaccgaagggaagaaaccgaaacggctattcttcgggaatttggaagaaccgtcataacgtccgttcgtttcaagcaaatacttgccggcaaacgaatagttaatgcgatagaataaccctcttaccgtataacgttcaaatttgtctttagcaaaataatcacctgtcgactgcgaaatagacggcagatcttcattaatcatattcatacgcgacatctcagcataacgataatcactactctcctgattgaaacctcccatcaccgttacatcatgtttgccccatgagttgttatagttagcatagaagttcaatgcattataatccgtaataccattggaatattcatacttggaattggcagtggaaacctctttcacaaagttacctccatgtgcataatagaacttcttctcaaatttcgttttctcgttacttagatgattgaatgtatactcaccaatcaacttcacattcttcaaaggactgatcgtaacctttccgaaaatacgaagattattcttttgaatagttgtcggatatgccagatcaatcaagttacgaggagtattgatcggtaattcttcgccgtcaatattcattgttccagtagggaaataagaagggaatgcgactgctgctccccatataccatatcctccggaagtttccggcaatgaagagttagagttcgtatatttaatatccaattccggagtaatccatgaaaacacatctgaacggagataagaagacacattgtaacgcttgtacgtatctttatccgaagccagtaccccattttcattcaccataccgaaggagaaacgataagaaatatctttcgtaccgccacctaccgaaatattatgagtttgctggaaaccagtctccatcatatcatcgaaaagatcagtttctgccaagctataacgcagcccgtccaccattgcataaccatccggatatgcagacggattagcattatattccttcaaaagtcccaaccaggtatctacgttctgaccactttgataatttattgtccccatgtccttataagcctgtaccgtttggagcggagtagccttatgaggcatattggcaggtctgctaaaagagaagttatttgaataattaatagagagtttagttgcatccgagcctttctttgtagtaatcaaaatcacaccgaaagctgcccgtgctccgtaaatagcagaagatgccgcatccttcaaaacagtcaccgattcaatatcgttcggatcgagcatattaatatccatctccacgttatctaccagcaccagcggtttcccattcttatccaaactgttgacaccacgaatgttgaaactcatttcttcaccgggtcttcctgaattacctgtaatctgcaagccgggcattgcccctttcaaagcgtcactcacagacaccaccggacggtcacctaaaacatcatccatcttcacactgctcaccgcacctgtcaggttcgctttcttttgtacgccgtaaccaacaactactacttcgtctattaaccgagtatcttctttcaaagttacattgagaggacgttgatctttcaccaccacttcctgtgtggcatagccgatatacgatatggataaacgggcattcggagtaaccatcaaagaaaaattgccatccatatccgtaatggtaccttccgtagaatcgaccactttcacatttgccccaatcaccccttcacctgtaggatcagtgattctaccttttaagacaaacgctttttcctgttctttctgcggtgtcactgcatggaacataatcacccgggggccgttcacttcataactgacgtccgtaccggccagcaattgtcccatcacatcattaatagtaccgttatttatattcacagagactttcctattcaaatcaatgtcattattacgaatcaggaaagagtaattgccttgcttctttattacttcaatggcttctttcaaagtaatattatctactttcacactgaatcgcttactttgttcctgtgccgatagctggaaaccaccagtcaaaacgtttcctacagacaaaagcagaagcattaataatattctttttactattaatctcatatttttcactattaaaggttaacataatatctttctatacaacgctgaaccaccgatatatctatcgactaagttcccaatcatactttactttttcttattttacctcctttttcttgtcagttataaagatagtgtctccactaactttccatgtatattgcttctcaacgttgatttctcccaatatatcattgatactttgattactattgaaacatccggaaaagcgttccgctttcagacgttcactctctaaactgatcttcacctggaatttgcgctccagacggtgtgcgatgtcggcaaacggagcatcttcaaatgtcaggccaccatccaaccagtcacaggcagaactagcatttgatttcattttctccatgcggcccgtattcttatcgtaaaaagcctgttcgctagggaatagtttcattaccgaaccggacaaagtggctaaattgacacgaccttccaacaaagataccattacataattatcgtcatcataagcgcgtacattaaaaacagtccctaccacctttacctgtacaccattcgtatttacaaagaaaggaatcttctcatttttcgccaccttgaaatatccttcgccatcaagcgtaacatcacgttcacgaataccgaacccacggcaataacgtaacacagaacccgcattcaatgaaacctctgttccatccggaagcacaatattcgtccgcgaaccagctggcactttaatttcataaggagaatccgcattcgtatatacttccgtaagattttcagtataagtgtaccagaagtaattacagcccaacaacaaaataattgcagcagctaccttcagccacacaggaactatcttccgcgaacggacaggtttcatctcagcagcggctattttttcttttatctgtgataaattagcatcctctactttggcaaatgcaggcacagaagaaacagcccatactgcggacatctcccggaaaattttagctgcatcttcattggaagccagataagcgaacagagcttctttctcctcttcggtgcagttaccggacagatagttgcttatccggatttccaattcttctatatgataagagtcattcataaacgtactttttctatgggtgtatataactagatacgcaataaaaaaagaaacgtttaaaagaaaagcgattttttttagagaaacatcaaaatagctatcatataaggagtacccagtgattcgcgtagcttagtcaatgctattttcatctgtactcttacagtggtcacattaatattctgctcctcggcaatttcactgtatgtcttaccctcatacaaacttgctttaaatatggcacggcatttggctggcaattcctccaccttcttcatgatgatggtattcatttcgctatgctccaatgcctgcaaaggattatcggaagaaagaatatgattttcgagaaaagcccagatttcttccatctgttccatcatctgtttttcgttgaagtaggaagaacgcagataactaatacttgcgttttgaatagcacgccgcaagtacggaagagccgggtgagtgatatggtggcgattctgccaaaaagcgacaaagacatcattcacaatctcccctgccaccctcttgtcatgcacataataaacagctatcgcacacaaataaaggtagtaggtatgatagattttatcaaatgcttttgtattaccgtgatttaactgttcaattagattttcagagatttctggtagattcattcgttgtctttctttaaggaacggtgcaaatatagcgattaattcagaaaaacaaaattccaatcagataaaccggagcccggcaatcattccttaaccctacaatcccatcggtattttcaacaaataccaaacgataaacagcaatgtccagacaaccaggatgcctaatgaatatctccaagtatatttcagcaatgaaccatacgtaatctgcttatcatattgccgcatataggtaagcaccagaggcatatagaataagaaaggagtaatggcattcgtcgaactatctccgatacggaaagcacattgtgctatatccggagcaattcccatctgtgcaaacatcgggataaagataaaagacataaaagcccatttggaggtagcagataccataatcagatttatcaatgccgtaaacagaataaacagaacaagagcagacaaaggagccggttcaaacgaagaaagcaagtcagcccccataatcgccagacatttatccagatgggaatattcaaaacaggcaaacatctgcgcagcgaagaaagcgataacgaaatacactccaagaagtttcattggctgcgtaagtccttcaatcacgtcattgtcagtgcgataccgtccggaactgaatccataagccattcccgtaatacctgctcccaaagaaagcaaaaacaaaataccggcaataaaaggcgaatgcatcaaaccaccattcacaccccgcaaaattccataagaagaaaaagtaagccacaagataagagccacatagatagctgccacaacaatggaaatcataatggcacgccgctctttacgagacagaggatggtaagccaccaccttcatactgccttcatacttacctaacgtaggaagaagccatttttgagtaatccaatacacaatagccgtaatggccaccgttgaagcactcataaaaaagtaattgcaaagaggttctgtattcccctgataacccgtttgtgccagtgcagcctcttgcgtggtatgcgccaacaacgggtccatcgtactcaatacaatattagcactatacccgcacgcaacggaaacataagccgtaacaatccctgcaatcggatgaagccccacccattgaaacagcatagcagcaataggcaataaaatgatatatccaccatcaccaatggcattcgacaacaagccaagcacaatcacccacaagatgatcttcctcttttcctgccggtttcccacccccatgcggatacaagcatcaataaaaccggaatgttgtgccactcccaatccgaacatagcaataatcaccatgcccaatggagcaaaacctgtaaagttcttaatagcattccgcaaccaccagcggattccttccggactcaacaggctttgtacacggatgtcctcacctgtttgtggcaatgtcactttcaacccatagatatcgcatatccatgaaagaaagaccactgccattgttagcagaaggaacatcgtagcgggatggggcatacgccatttattcttcatcattttccgactaagcaagaagctaccgttaatacttaatttactcttcgtcaggctccagattatccagatcaataatacgcaattccaatgcacgtactgccaaccgggtagcattcactcccacccgttctccattcgggaaaagacgtccaataagatcattctgccgtttctccaatgatttcacaccaaaaggcattcctttcagattggcaatcatctctttcgtataacccaaagccagatgacggagaaaacgttcatcgtattcatcaatatcatagctgatgacagcctcctgacgcttagcatcattggctacagatttcttgaaacgatctacaatcttttccagaatcggatagttaaataccaatttctttccatccatcacagcctgtacatctgttttcgtcagtagctcacccgttttgaggatgattccatcggcaccggcattcaatacgtccacccacaacttttcgttcagaatctcacccgtgaagatcaatacccgaactcctttgtaacgtttgaatatattcttgcaaatatcaacaccaatggtcgtagaacctcctagtcctaagtccaacaataccagatcgggaagctgggcctccatcaacggccaaaactcactttccgtcattgccgtgccgattacttctgcattcggtatttcatgacggaatatttcttctgtccctttcaactccagttttacatcctctacaataataactttaaacttctgttcttccatgttccttatctaataacttttatgtgttttccttttatcggcgcggaatagtgaaataaactgtaaacccgccgccttcagccggctcggcattgatacggcatcccctacgtcccgcaaattcgtcgtggtcgcggataatctgcttgcataccagatattccgttcccctcaactcccctttttcaccggaagtcatacgtgccagattcggataaaatagttgattcaactcttccacactcttctcacgtctcgtatccgtaaagaggaaacgaatatattcattatccttgcgcgcttgcagacgtatcactccatcttcacgcacagtcaatgcttcatcaatcaaattttccaatagaaaacgcaactgattcacgtctcctatcaccttcgcctccatcgactctatttccaattctatcctctccggccgattcttcatcaacttcttgaaatattttccggcagcatccaaaagttcctgcaccggaatcaccgtacgccggaaagtgacttcctccaattgacgagaagcgcacgaactcaaaatcgtaaaaattcccttataatattcgatcaattccgtcatagtctccactgcttcacgctcctccgtttccgaaagcttctgcgtattcaaccgccctacaatctgtttgattttattcggataataaatcgtctcatgtttaatagtcgacagacagttgtcaagcaccatattctgaacatgcaacatgctgtcttcccaggaagcccggcgtgtttcttcgtgtgccgactcgatatcccggtattttgtagccagtttcaccactgcgttaaacacaacaatagccacataacgagctaccagttcaaaaagcagtcgatccgtctcctgttccgttccttctctgcgctccagataaagcacaccaacacattgatgctcgctccctgcttccaccatcagcggaattgcctgaagatgctgttcagaaagatatttcccggaactaaaacactgctctaccatctccggcatttcctgtccgggacgagaagcatattccagccgatgtgtcgtttcattataaacggcaattcccatccggtcaatcgtcagtaattcatttaccgaaccgaatgcttcatccacaatccgctgcggaatttctttaagcatactctcttcccgttgaagcgcctctgcattttcctgttcctgcggtctcaccaaagatgcagcaaacaccttctggttaatctcaagtacctgttcgagattcaaacgattctgcaaacgttttctcatgtacagaaaataatatccgaccaacgaaacaatcaataaaacaaagcataaaataattcctaccgtcttattggtattcgaacgctccaactgccggcaatatgcttcgagagtttgatcctctccctgcaacttatacaaatccgtaaatgccgaattattataactatatgcatccaactgtttcaaagccagaaaagcaactgacgcctcattcctgatatccaaaattacatgataatccgaatcaaacagttcgttccaccaactgatttcagcaggcgttccctcacctaccagcttcatataccgatgcgggcgatccggacgcgcatatttttcataatgctcattcagaaaaagcatcgcagaatctatatattgcaaagccaactcataattttcatccacattagcaaaataggcagcattcgcataatccgacgctacatccagcaaatcctcatacgcagaatccgtaactactacaatcgaatcgccatcctgcaacatgggaggaatcggatcatgcagacaagaaaccatccccaacggaagcaacaagcaaagcaacaatacccccatcgctttacgcactcccgaaggcaaacgaaaataaaaacggcttcccttccccagttcactctccacatcaaaaacgcatccccggaataaatcattcgttttcttatacttctcaatgattcccttacaattcatcaatccgaaaccactacctttgttttctttcaacacttccggatcggctgcattcttcattccgatcacacgggaatcatacaccttctcaccaatgatatacgccacatcctcttcggaaatacctcttccgttatcctccacagagatctcgacataggcatcctccgtagtgcgggcatacactttaatggttcctccttccggagtatatttacgggcattttctgccagcgtattaatcataaacaaagtcagtgcccggtcggccttcaccataaccgtagtcggttcaatttccaacttctgatttttcatttcaaaagcacgtcttcccttgcctagcagctcaaacagttcattgagactgaaagtttcaatattcaggctaagcgttccttgcttcatcttaatccaaagagccagaatatcgttgtactcattaatcgtagttaccagttcgtcaatgtattgatacttctctttcttaatcttcgcattatcaatatacccccgctccgtcaacttatgcacctcgttcaagatacggtcgatataaggattaattccattgacaatagccagacaagccttctttataagattctggcgtttatttcctgcaatatgctgttcgtaaacataccgttgcttttccaactgcatccgctcgtcactcaacgcttccaccatctgctcattgtccgcagcccaaacaatatacggctcaagcacatgcaccaaagctttttcatcacggttcaaccgatgcagaggaaccagtgccgcttttccttcctccggaatttccagttgaagacgtcctttcccaaataattgatcgataccttgttgaattaatggaacattcatcggaatggacgaagttatgtcccgacaaagagtcagaatccgttgcagacgctccacgtctacctgattccttattttagaccgtttattgaaaaaccaccaaagaataaccactagtacaagcccgacaataaccaaagaaagtacaagcgtcatttgtcgtgaatcggcttccaatgaaagatagcggctctccaactccttatcctgacgggtataattcaaaatatccaaatatatattccggttgtaatcagaagcatacttcatcccgagccccgcatacgacacactcaattgctcccgaattcttgagatccattcaggtaccgttctcacatcttcctgcatgatccatggaaccccggtataagtcgtatctccttctacaaaaacatgtagtttatccaatgtatccgccgcatggtgataatagagcatgtgatgttgattcacacaatccaacgcttttgcaagcgtatccaatgcctccgtataacgtccgtgctcattcatatatttaccgatagacacatacgcaccggcaatctgatacaaatcattgtactcacgaaatttttcaagcgcacgctgtgccattcgcaaaggcaaaagcgaatctacgggaaacccaaactgatctagcgcatatccccttctcgtccgaaaaagttcgaaattattaggtgaaaccatcagattagccaatccttgcagaccatttccttcgaaataaggatgattagtctgaacagctgtccgccaggtaatataaagttggtcgaactcacgcattttccggtcttccggcttggttgcttccaccaacgaggccgaacctttaatataatgataataaagcaactgattagtatctgtcaaagcttcatcttccggaatccggttaagagatgtgatggcctcctgccgttgctgcagatagtaataataaatagaagaaacgatgaaaaattcggtgaatgcataatccagccgtagtgcctcgtgacggtcggcaaacaaatcactctcttcacgaatacgtttcatgcgcttgagcgcactattacgataatcataaaattctttgttcatagccgtccgctgacagattttcatcagtccgatgtcggcaatcaacagttcgagttcatttttagtcagtttatatacttccttatgcaacgcttccgcccggtcaaagtccatagccataaaagcacagaaccccaggttgttggatgcttccgctttccccgacttgtagaaattcacctgtctataggcttcattggcatatttataagaagaatccaggcttcgataacgataagcatacgctttcccgtttaatgaatcaatcaggcgcacctctttggtcggcaccatatcagtgcacgaaaaaaaagaggcaaacaacactatacctattatatataaaggaaagcgtgaactcatttttgactattaactgttttcagaaagcaaatctacaaatatttccgataagttggagagaaaaatattttttatacaataagtccttctaaataataagagaaattcctacctttgcaggcaaattaacaaataggtaacatctattacaaaatgagcgaaaaagcaccctttatggtattctcgggaacgaactcgagatatctggcagaaaaaatctgcgcaagcctggattgtcctctgggaaatatgaacattacccattttgccgatggcgaatttgctgtttcatatgaggagtcaattcgtggcgcacacgtattcctggttcaatccactttccctaattcagacaacctgatggaacttctcttgatgatcgatgctgcaaaacgtgcgtctgcaaagagtattgtagctgtagtcccctatttcggatgggcacgtcaggatagaaaagacaaaccccgtgtatctatcggcgctaagttggtagccgacctgctgtctgttgcaggtatcgaccgtctgattacgatggacttgcatgcagaccagattcagggattcttcaatatcccggtagatcacctgtacgcatcagcagtattccttccttatatccagtcattgcaactggaaaatctggttattgctacaccggatgtaggaggttcaaaacgtgccagtactttctccaaatacctcggtgtaccattggtactctgtaacaaatcacgtgaaaaagccaatgaagtagcatctatgcaaatcatcggtgacgtagaaggtaaaaacgtagtattgattgacgatatcgtagacactgcaggaacaattaccaaagcagccaacatcatgttggatgccggtgccaaatctgtacgcgccatcgccagccactgcgtaatgtctgatccggcttctttccgcgtgcaagagtctgccctgacagaaatggtatttaccgacagcatcccatacgcaaagaaatgtccgaaagtaaaacagttgagtattgccgatatgtttgctgaaacaatcaaacgagtgatgaataacgaatctatcagttcacaatacatcatttaatagatgataggtgacaaatgctagttgatagttgaagttactttcaacaggaaattataaaatggataatgaccgctttgggttattatccatttttctttgtccataccaattatcattattccatcatctggtacatatatgcaaaaaaataggccacgcaatgcgcagcccactaccatttatcatctattgaagtcttccgaatttataggttccttttttaatcaccttcccatctttatctgtttccacaaaaggaccatttttctttccttgtttgaaaaagccctcgaagcgattaccatctttgtcgatttgtacgccctgtccatcttccaatccgtcaacaaagccacctttatattgcatcccagcaacggttttcagagtaccctgtccattgggacggttgtctttccaatcaccgtcataaacatcgccattgctccatttatagactcctctgccatcacgtttattgtttttccagcttccttcgtacacagcaccattcgcccaggtaaaagtaccctttccgtcttgcatgccatttttgaaattacctacatacttgtcgccgttagcatgataataaactccttcaccggtgcgttcacctaagagataagaaccttcataacgatcgcccgtgtgaaagtagtaagtacctcttccgtgttgaatatcatccgcccagtcaccatcgtatttatctccattggtatattcaaataccccttttccgtgacggacatcatctttccaatctccttcatacttacagccatcgtcccagttcatgatacctttgccgttcttcttatcatttttccaatgaccggtatatttggctccattcgcccaagtgtatgtaccttcgccttcacgtttatcattcacccaatgacctacatataaatcaccgttatgataatacattgttccttcaccatgctgataatcctgataccacataccgtcgtaacggttgttattcataaaataatagataccttttccatgctgctgatcctggaaccactgtccttcgtacttttctccgtcaggaaacatataaattccatatccttcacgtttccccttcacatattcaccttcaaagacatcaccgtttttaaagactgtttttccttttccattcggttttcgtcctttcatttctcctgtatagacactgccatccttaaaagtatagttgccaatctttatttcagtggagaatgtatctttaatttttccgaaaaatccgcctttttttccttcattttcttgtgccatcactccctcttgtgcaagaagagccaataaaagtgtagtatatagatatttcctcattggttttagtcgttactcattttagaattacaatttggacaaagatacaatttctatcccaaacagcccactttcggaaagcaatttatgacaactttttacctgcaatgacctcttttaatgtctctttgcacaaatagcgctgtgccaaatcctgtatttccatcggagtaacctcattcacagccagcagagaacgtgaaaagtagtcatcatccagaccggaagtagctatgaagatccacgcatccgaaagtgagaaaggcgactcataactacggcacatttctcccaacatatagttgcgtacaatagtcaattcttcggctgacacaggttcctgatgcaggaggtctatttcatgatacacttcctgtatcaacggttccacatattcattatccgtttctgtcgagatagccaatagtccgctatccggataaaacatgattcctgccgaaataccataagtatatcccttctcttcacgaatattagacatcagccgactaccgaaataacctccgaataaagtcatcaatacccgaagtttcaaataatcaggatgattacgagtaatggtcgtatatcccatcttcacagcactctgcatggcgtcttcacgctctgtaaaaattctctttccgggaacagcagtaaaaggaaaacttaatctcgacacctgctgctgatgctgaccgaaagaagtgccgaatgtatctgtcacccggctgataatatcctccgtcaccttaccggacaaaaagatagagcaattacccgaatgataataccgttcataaaattcacggagcacttccggagtgatggcatgataatcttcctccaccactattttaccacatggatgctgttcaccgtaaagcgactgcaacagactgcggtgtgccagaaaatcaactttggaagtattgacctggtattgttggatattggtatcgagaatggtatgcaattccttttccggaaaaagcggttctctaatcatggattccaccacctccaatgttttcgccaaatacttattcaacgaataaacagtgatatatgcatattccgacgagctggacaattcgagccatgagccgtagtaatccagtttttcggcaatggtggcagccgtatattttttcgtgccttcgcgcagcatccggttcgtaaacagagcttgcagtttctgcgattgctgccagcgtcccccggcaaaaagcacatctatgcgtactacttcctgttcacccgcattaataacagtcaacggaatgccgtttggcaacgtcattcgaacgggaggaagtatacgaaaatttttcagggtttgtatttcaggttgtatcgtacgatccataagattagattctattcttcaaaaaatcttctgcccgttccaagtcttgtggagtatcgattccaatagtttccacctcactgataccgacctttattttgtatccgttctccagccagcgaagctgctccaaagattcggccaactccaaagaagactgtggaagcatggtaatctctttcagcacctctgtacgatacgcatacaatccgatgtgcttgtagtaggtatgtcccttcaaccagtcctgtttctcggcattacgctgataaggaatgatagaacgactgaaataaagtgcgttccagttcttgttgactactactttcggtgaattcacgttttccagtacggcaaacggttcatcggcagtaaaaggcttcaccaacgtagcaatctgcgtggttacatcttcaaaacaagcctttaccgcatccagttgtgaaggctgaataaaaggctcatctccttgtatattcactacgacgtcaaaatcacctccaatcttggtacaggcttcataacaacgatccgtaccacttttatggtgaacggaagtcatcacaacctttcccccgaacgccttaacggcagcttcaatgcgttcatcatccgtagctacataagcgtcatccaaaacgcctgccacttgttcgtatacgcgttgtatgactgtttttccgcccaacatagccaacggtttcgcaggaaaacgagtggatgcatagcgggcaggtataattccaagaaatttcatctacttaataaataatgaagaatggaaagcagataatgactgttgtatatatcccctttgccaatcctccggttttaatattttgttatcatataaaagcatgtcaatatccagacaaaccttttcctctttcttatcctccgaacgacgtccggacctctgttctatatctttcagcattttcctcaccgtctcttcatccttatcggaatagaacagaaccacttgattggaaaacagagccggattcttaaaaaacaaaggtttagtttccagttcgggagcaaaacatatagaagagaacgattcagtcagcttctgcctggcaaaagtcaagttctctttcctgttgtaattactccctatgcaaacaatatacttgtgcacttctttaattgaaaagatcgtccaatcccccttcttctatcacttcgccatcaggagtttccgaaccggcacacgggtcaaacccttcagggagtttgaatctctcctgctggtcatatcccaaggtcggatcgtcatacactttcttcatatacattgcccagataggcaaagctgcagcagcaccctgtccataggtcattctaccgaagtgaatatcacgttcgtcccctcctacccaacaaccggataccagtgaaggagtgaatcccataaaccaggcatcggagttatcattggtcgttccagtttttccacccatatcggcggtaatcccatatcgacgaacacgtccacccgttccttcattgataacggcacgcagcataaccagcattttgtaagtgctcgacgcgcttattacttcttccatttgcggtgcaaaagtagaaatgacattgccatcactatcctcaatacgggtaacgaacaatggagccacccggattcctttattggcaaaagctgtgtatgcgctgaccatttcaccgacagaaatttcacaaggtcccagacaaagtgaaaccaccggatcaattgctttattacgtacaccaaaactatggatcaagcgtaccaaatcatacggattcagcttacccatcagatatgcagaaatccagttatcggagtttgccaatccccatttcagagttaccatttctccataacgcttatcatttgcattacgtggtgtccagggagttccattctcatcaatcaaagtctgctctacgtggcgtgcctgatcgcaaggagaaaatccgttctccattgccaatgtatataaatacggcttaatagtagaacctacctgacgacgtcccaccatcgccatatcatactggaaatatacataattcggtccgcccacataagccttcacgtgtccgtttgccggatccattgacataaatcccgtccgcaagaaagatttgtagtagcggatggaatccatcggtgtcataatcgtatctttatcacccttccaggaaaagacagtcatttcttccggtgtatcgaacgccttacgaatctgttgttccgaagctcccgcctctttcatgaggcgataacgttccgtttgtttcattgctttcgtcaacaactcttccactcgtttttccggtagtgatcgtgcatacggagcattcttacttccctctttttctttgaagaatataggttgcagataatcacccaaatgctcttttacagcatcttcggcatactgctgcatacgtgaattgatagttgtataaatcttcaatccatctgtatagatattataatttgtaccgtctttcttcttgtttttcgcacaccagccatataacgggttagtttcccaagcgatggaatcttcgtagaatttctgcatttgccaaccacgataatcacttcttaccggtttcggtgctgtcatgacgccacggagatattcacggaaataagtagccagcccctctttatggtcaacacgattgtaagtcagtttcaacggaagagcctgcaaagaatcacattctgcatctgtgatatatccagctttacgcatctgctcaagcaccacattacgacggccacgggaacgttcgttgaaacgaaccggattgtagagtgacggattcttacacatacccaccaacgtagctgcttcttcaatcttcaagtccttcggttcacagccaaaataggtatatgcagcagttttgataccaacagcattattcagaaaatcaaatttattgagatacatactcaatatttcctctttggtatagtaacgttcaagtttcaccgcaatcacccattcaatcggtttttggaaaagacgttgaagtgtatttctcgccacattttctgtaaacaactgtttagctagctgttgtgacaaggtactacccccacctgcatttttctgaaacatcaaaccacgtttcacaaacgcacggaacaatgctttggcatcaatacccgaatgctcgacaaaacgaacatcttccgttgcaataagagcattgataatactgggtgacaaatccttgtaagccgtgtacacccggttttccttgctgtaagaccatgtaccaagcactttctcatcttcagaaaaaatctctgttgcaaatttatagctcgggttctcgagttcctctacaggaggcatatagccaatccaaccctttgaaatggagacaaagactataacaatagccaatactatgactgccaagaatatccaaagagcttttattatttttcgaatcatgttttttctcgcttaaaatgacgcatttaattaagatgcaaaggtagataaaatccgctattcagccaacgagtttgattataatttctattttgttaaaatatagagcgatactcctaacaaatagcatgaaacaaaacaaaaaagagcatttttcaagaaagcaaccctcttattatatctaaacacaaacaggcgggaaaaatcccgcctgttattcattcataaatatacctatttataagataatcaattacaaggttgctgcctgcacacctaccactccggcaatcgcaccggcaacagcaataatcactttcaaaataatactccacgtttttttcatagacatttctctttttaaattaaacactaaatgaacactctaaccgtcagctattaatcaacgagacattaagctgcgggatccggtgcctctccgctaccgccaccttcatctccgccaccttcgccttcatccggtttctcgggatcttccggagatacagtaacgctaattttcttcagatattcatccagactgatcagatctaacttctcatctgcacgggtagcagttttggtgacacgcaactctttattggcttggaaaaagatacgaacactatccacactcttagcattaatatccttcgccaactccgcacctttcgaacgggcagtcaacataaacacacccaaaccttcgatattcacagacttaccttccaataactgctccttcattttttccacaaaattctggattacactcttgatgtcaccgacagacagcgaagaacgatcctgcattttctgtgcaatatatttcaggttgacggactgacctaaagtgatcagatgcggataatatctcttaggagaattgggaacacgcggatctgttggccgcgtaatgactttgtaaattacactcatactacgtttttttaagatttaaattcaagttatttattcacattttgttgatcaacgatgcaaaggtgaagcttttattccggatagaaaagaaaaaagccccttgcggagctctttatattcaatcaagtatatagcgacttataaatcaatgatataatcaagcatttataatcttccagtctccaatcgtacaccgttcgctatcaaaactgacagccacctttacgacaggcaatccacataaagcaaaacgttccggataattcttcaaatcaatttgctccatcgcttcaccagcacttttatccaatttcagttccatcacatacaatgtagtcttcgtacgaagtactatatctacccgtccacgaggagtacgaacctccacatccacgtaataccctaataaactaaatatgatataaaagacctgttgatagtgtccttcgaaccttgtattgtcgcagtaaggaatcgtagacagaaattcctgcaaacggtgtaaagcagcatccatatcaccattctgaatatcataaaaaagataagccaccatggtagttgcttcaggtgtcttgttatttacataataaggaagaaggctctccataagtcccagccttacttctttattgggaatatccagcgtataaagatctagcatcttattataatccttaatagtgatatacccactttggtacaataaaggcactgcatcagtcaccgtttcagtaggagcatcgaaaactgaggactttagttgtttacatccaatttcggaaggtttcactccgaatttattcagcatctttatcagatatgtgggagtaccgctaccaaaccaataagaattaaatttaccatccgcaaaagcatttagcaaactgaaaggattatatatatcgggcgaaggagatgtaaaatgataaccatcataattttctttcaatttcatcaaagcctcttcaggtgttatctccaatttctttgccaatcctcccaaatcatccttcatttgcaaacgtatctcatcttcactaattccacagatagcagcgtatggctcatccatactaatattctttatattattcaactcactaaaaatacttagttgggagaatttggtaataccagtcagaaatacatatcgcaaataaggatcacaagcttttaacaggctgtagaagttacgcatgatgttacgcaatacatccagattttcccgttcgtgcaccacatccagcaaaggagcatcatattcatcaataagtacaaccactttctttccggtctgctcataggcacgttttatcagtcccatcaaacgctgattgggattaacctcctcctccagccgtccataaatctgttcataaccatatagtttcagattcaattcttggagcaactgttcactatccgcatgtttggcagtactcatatcgaagtgaagcaccggatattccacccactccttctccagtttctccatagccaatccatgaaacagctccttgcgtccggagaaatagctatgcagcgtggaagtaagtaatgacttaccaaagcgccgtggacggctcaagaacatatatttggcagaggaatgtgtcatccgataaacatattccgttttatcaatatagaggtaattcccctcccgtatttccgaaaatgtctgtatcccaatggggtatctttgcaaatcttccatatcaatcatatttattacaatacttaagcatttataatctcccagtccccaatcgtacaccgttcgctatcaaagctgacagccacctttacgacaggcaatccacataaagcaaagcgttccggataattcttcaaatcaatttgctccatcgcttcacccgcacttttatccaatttcagttccatcacatacaatgtagtcttcgtacgaagtactatatctacccgtccacgaggagtacgaacttccacatccacataataccctaataaactaaatatgatataaaaaacctgctgatagtgtccttcatatttcgtattatcgcattgcggtatagtggacaggaacgtttgcaaacggcgtaatgcagtatccatatccccattacggatatcacgggaaagatacgccaccatcgtattggcttccggtgctttgccgccaacataatgtggaagaagacttttcatcaggcctattctcacttccttattaggaatattcaatgtatacaagtctaattcctcatcataattcttaatagtgatatagccactttgatatagcagcgggataatacttgtcatcctttctgttggtgcatcaaaatcctcgaccgaaaccctattatttccaatttcggaaggttccacgccaaacttcttcaacatatttatcagatacgtaggcgtaccgctaccaaaccaataagatccaaattttccatctgcaaaagcatttagcaaactgaaaggattatatatatcgggcgaaggagaagtgaaatgataaccatcataattttctttcaatttcatcaaagcctcttcaggtgttatccccaatttctttgccaatccttccaaatcatccttcatttgcaaacgtatctcatcttcactaattccacagataacagcgtatggctcatccatactaatattctttatattattcaactcactaaaaatacttagttgtgagaatttagtaataccagtcagaaatacataacgcaaataaggatcacaagcttttaacggactgtagaagttacgcaatacatccagattttcccgttcatgtaccacatcaagcaaaggagcatcatattcatcaataagcacaaccaccttcttacctgtttgctcataagcacgcttaataagattaactaagcgtagattggcatccccctctactgcgttaacagcaaacgtacgttcatattcagcaagcataaaatcaagaagacgttccaatcctcctttatccatatgtttcgccatactcatatcaaagtgaagcaccggatattccgtccactccttctccagtttctccatagccaatccgtgaaacaggtccttgcgtccggaaaaatagctatgcagcgtagaagtaagtaatgatttcccaaaacgtcgtggacggctcaaaaacatatagctggaagccgaatgagtcatccgataaacatattccgttttatcaatatagaggtaattcccctcccgtatcttcgagaatgtctgtatcccgataggatataatctttgcaaatcttccatatcaatcatatttttcacaaagctactaaaaattatccatcagtcattgctttacaaaaaaaatatcaactatcttcacagacggttgatataatagaaatcacatcggatttacaccgacatgagggcgttgatcaggaatacaccgctgtgtatttcctgaccacaaaatgtagggatcttcatgtgtgtagcatgaagttagggacctacatgtttcatctcacttataagcatccaattttaacataacgataaaaactcatcctccgccagatctcgattgaactgttgatgtaattacagcaacaaagatcggttgtattgttgtattctcataaggtgtagtcgtggctggaggacactatatacccatttccttcatacacttttcaacatcctcaagtgggacattgagcattcggctgacgtagagaggagtaactacatccatggatccagactgacgctccataccgatgaggtaagtgatttgctctttgagtttcttcatggaatcaaatatctctgacccatcctgtccgaaagcaacatctttcgcttcatagataactgttggctcaagcacctctactgtatgccacacgtcagcagggacgacacaaccaaagttacctaaggttggatcaaggagtaagcggtcggtttcgtttccctcatcatcatacaacacctctacgagctttccgcaaagtagaataacattctcgttgcttcttggatggcgatgaataggcaccacagttccaggcatcattgcgttcagcattctttgagaggtatcactctcagaagtacgcaaatcataattcatacgcttgcgctccgagactacagccttatcaaataaattctttattagatctttgtcaatctgtatcataataaattacttttttaatgaagccaaatactcctcatgaagatggtagtacttctttttaaaaagaatatatgctaaagcaaagacaatagcagtagctaccaaatatccccaatgggctgcaatggaattaggacagagataaataaagcctaatgatactgccaactgcataaccatgtaaagtagactaatttttacgtgtccaatcttcagttcattacacattaattgatatgcatgcttacgatgagcctctccgaggttttcgtgaagcatgatgcgatggcagatagtcagtacgccatctacaccatagataagcaagaatatcagataagtaaaatcaccagtagcaatgattaccttaccgataaggaaaagcatgatgaatgcgataccgatagaaccgacatcaccagcaaagcactttgccttacctttcggacgaaagttgaagatgcaaaatactaataccgaaatgatgctcaccagaatcagacttaggtctgcatcatctgataccaatgcaagaggtgcaagaactgccagggcataaccagccgtaatgccattgatgccatccataaagttgattacgttcgttgcacccacatacacaacgagggcgagcataatgaacaatccacccatcagtatgccatattgtgagaaccaggctgcattcagcatacccaactgatagaatgccaaagcagctgctgcgaactgagctaccaaacgcacgctatcgggcaaagaacggatatcatcaataaagctaacacccgcgatcagagtcaagcccagaataaaccagggatattgaaatccgaagaaagcgctccacacccatgcacccagcaggaagatgatgccgccaccacgaagaacaattgtggaatggctcgaacgctcattgggtttgtctatgatgttgcacttatcggcaatcttaaagtatgccaactcaagggcaagtaagattactaagataattccgtaagtaatgtaaatactcatatagatatctgttactatggtctttgaatattcaaattctttattttttctccaaactttctgcaacacgcttgagggattcctcaaaacttaccaactgataatcaaagtccatcttcgacatctccgggtcgtagtagtatgtagcaaacatcttgttgataggctgcaacacaaaactgcctaaccacacaaacggattcagcagtttggtgatccaaaccttgtgaccggttgcctttgcaaaataacgaatgatttcaaccgtatctgattgctctttattttgaggatagaacgtaccagataacttgcgcttaattgcttgctttacaaactcagacagattatctatgtagagcatgcttctcttattgtgccagcaaggaaatacaggcaccttggtcgcaagacctgctaaacgagggaagtttcccttcgcattcgggccgtatatcatacatggacgaaggatgcagactttgaaattctcatcctccagtggtttgatgccaagttctgcctgaagtttactatccccatagaacccgttaggattctctttagtgtccttagtcagcacctctcctttgagcgactggctctcatggaagacaatctgtgaactcatgaaaatgaactgcttcacacaattggccttagcatgtttcgccacctcgatggtgaggtcgcgattcaccttgtaatacagtggctccatcttagggtcagcattcacatgcgcaatacctgccacatgaaacaccacatcatactgactgtagtctgccattttccaattgtcgcccatggtgtcaacggaatctatctgatactgttcgggagcagttccgagaatatagttgcgcactgactcgcctacataggagccagcacctgttataagtacttttgtcatatattgcattatttacattccaccatttttcttttcatcgcctttgctctcttcttttcctccagatacatcttaggcatcatcaggaggaatttgcctacacgtgagagctgcttcttgggctccttgaaaatgcgctccaaccagatgaagcggaggcctcggatctccttcttattgttatgaaggtctccggtatagaaattgaaggcagctccaatgccgaacaatactccttgctctatgcaggggaagatgttatgaatgaaagtttcctgcttaggagcacctaacgacacccatacgatatccggatgcagttcgttaatctgcttggctatagctggataatcgaactgatcaaccggcacgaaaggcacatctacatgggttaaatccaggtcgagccctttttctgctaccttggccttaatctggtccaccttcttttgtgtattacctaccaatacgtgcttgtatggtcgctcgatgtagtattcaaacaactcaggaccattaaaggcagagtagcttgtgccatagatagcattggccatcttggagatagagctaccatcacaggtattgatattggctcccttgactatctcacgatacttcaagtccttctgtgcgatggtgattacattcgcgtccaccacacaaacgtatgccttttgtttcttcgcaatataatcttctacagtcttgcagaagatctttgagtcaaactcgatgtgtatattaaatatgttcatatctttagggttatactttatcaaaccaatggttccagagcatcttggtgtatgaaaccaatacattctcgttgcggaacagacgatacttccaactactgtggaatatcttcttcgtctgccatattcggtacttaacaatattctcagacgacatctgtccatgtcggccgcataaggtatcatctaatagtcgttctgccaactgctcaatgccgggggctgtaggaggataatcaccatctatcgcaaactggtattgggtgatccatctgacagcattggcaaacttcaacatattcagttgctccatccattggaagtaatcattccaatccacctccttacaacaagcctttacaaacattgcccaatcacaaagctgcctcagcgacaactcatcttccataaagtgctggtaggcatgaaccgttaagaattaagcctcaaattgcgcagaatttctaatctccaaaagattttgaagatacatttcaaaagattttttctccttcgaccctcgtgcagtagtcagcaggcgatggttttcaacaataagacccttgtaggatatgtgcgaatgcttgtagtcatggatatccaccttcgcgccaaggatctcagccaaacgattaccttcttcatacgcccactcatgaccacccatatagcatcctgaaactcctttgtcacctgaaacctgaaatttgaaacttgaaacttccataggctcctccaacagaaacacatccaagtcacctaatgcccgcttttcgggatcgggataatagcgagcgcaagattcacctttcagaaccacaaaaatgatacccttagaacggtacacctccagcagatcatgtgccttctctcgatagccctcgttactgctctttatgtattccacctgccccagccaatccatgaggagatccatagggggcaactggctcttaggcaatttttcaatagcgctaaaaacagtttccgtcagcccctgattgctagccaaatcatatagtacgttccagtccttttctgtcaacgttccataacctacaagactgcaatcggtttcacccaatgcagacctcagcagagtccaattttttttttctattcgtttgttcaatgtggtagaaaattctggtaatataacatttggcgaactatggattagttcacctgtttatggttcgttaaaaggagacggttattaatttaataaacactcatccaccagatagaatgtcaaatgtcaacttgatagaagcaaagtgtagaacaacaagccagcttgattgttatgccggggcaacaacaagtcggcaaagccaacttaatcgaaatgtttttttagcaggctggacaatccaattgtcagcttctcgccttgtcacctgattatcctttactccatacttttcttcaagcactcgagcttggtctttcaaacagtgcttcggtgaattgcacttcggacttcttgcgaccggcttgatacctctatttcttctttgccttaaacctctcaaccgccttctcgtactccttgaccatcttgcgggcattggcttcccatgatatttcgcgttggcgatcgatacatccggctgagagttgacgaagagtgtcacgctcggtatccaggtcggctatgatcttagcgaactcctgtgcgctggcttcgggatccttgggttgtaccttgcgaccaatctcgtcatccacaattacaccaaaacctcgcatgtcgtgacaaactacaggcagtccggcactgatggcttcgggaactacagtagaggtggcatcatgcacactggtgaagaagaaaatatccatctccttcatcatctcacgagtcttgacgttaggcacaactcccatcaggtgtacgttctctttcagacccttgtcctctaccatcttggtgtacttctccacatccttcggatatccattaccggctacccacaggtggatgttcttcttatctttcagcagttccatagtgcggatggcaattccgagctgcttacgaaggtcatattttcccacccatagtaggttcagttccttcttgtccgaagcatgaggcttggaagtctcgtcaataaatgcacctgtctcgtttatcagaaccgtatccggacgatacacatcacgaagtgcctcataggtctccttatatgcacctactatggcatctgcacgtctggcagccttacccacacgaggctggaaatggaaggtaagatagttcagaaagttcttcaggttctccttaaacaacgacacaatgggttcgtctttcatgtatggattcgtcataccggcataaccacctataggcccccatacgaaaggcttgttttttatcttccataggtacccgggctcacgatagcagatcatattgagcttatgtatcacatcaatctcacgatgttctttaagctctaaactctcagctttaagctctgaaataatctcttgtgctttttcataggctcgtctctcccactgctcatagtacatatagaacttccatgtgccctggttccagcacatctcacgcacctccttcgataccggtaggtaaaagaagtgcatgttttctgcctgatggcgagtgagtcctgtagggttgactgtcttatccatattattcatcatggcagcggatagggattgttcaatctccgtttgccactcgccttctgttatgatatacagattgcagaatttggcaagattgctcacccagttccaacccattccttgctcgcttccccagttaggagctattgcgtatgcgtctattagaatgtttagcattatcagaatattatttgtagcagacaactgattcgatcagcagcatcgcgccatttgtctgcttgattaattaccgactcataaacttttgcatgatgcgtattataacacgagctggaatcttgaaaaaaccatgttgcttcatgcaacatgacataaacttaccctctaccttacggccagctgcttcaacattaaagccattctcgataagataacggtagccttcgcgcgtccatatacctttgcgaattcctgtaccgtctaccattgggaaacctatatctgctttgcgtttagagtttacgaccgagccccttatattaattttgttcttctgaatataatcacaaatattacgttcgtagtcccaaccagtccatccttctatacagaactgatggaggctatcttttttccaaatagaaggttgaagactgaaagcatatttggcagcaacagggtcctcgcaataatctatattcccatggatagggagattatctcgatatggagcttccaaacgaatataatcaacattattatccgaacaaaaatgcacatgcttctctactgcatctgtactcattggagccccaagaaaatagtcttcctgtagatatagtatatactcttcatgtatctctgccagtgccttctttgtattacttccccagccaagatgctcacccactttaatcgttcttatgctctcatcaccactatctttgtgattactgatgagatatattgaatatgggcagtcactccaatactgatggatggaatgaaatagtggcttccaacaatcactatacagatcgcaggaactgattactactgctaaatttgctgccatgtgttgtcttactttattttttccatatactccttcaaactcatcaggttcttgtccttctctgagataatcatattctcgatgccaccaatcttgtcaaaaggccatacgatgcccatgtcgggatcattgtagctgataccagcatcaccttccccatagaaaacttcaccacacttatagctgacaacagaatcctcgagcacaaggtagccatgaccgaagaactgaggtatatagagggttttctgattatctccggtaaggtcaaagccttgccacttgccgaaggtaggcgaatcaggacggaggtcgatgataacatcatacacgtgtccgctgatgcaacgaaccaactttgcctgctgcttcacgagctgaaagtgcatagcacgaataacacccttcttggatatggtgtagaatacttccttaagttcatgctcaataccattggccttgaacatgtcgatattataatccttgacaaagccaccacgttcgtcagtagcatagaagggtgtaatctcaaaagcacccttcatttcaagttccttgaattcaaatttccgaaccattttcgtaaatgtttaaagtttaatggtttaagaggctaaaggctcttgagccaagcaattgttttgttgataccattatcaaagtcggtagagacatactctccaacagcctcaacaaggtctttgttgcaaaacatgtccattgagtacttgatgccatcatcaggacggatgccgatgcctaccttgtcagcataaccaaccaattcgccaatgcgaaggagataattcttcaggatgcgaggagagccggaaccgatatagtagaaagccttcttggtttcgttggctccaaggcgatagactgcctcaatcagatcttctacatagataaaatcgtatggttggagtgcaggactgaaagtagcctctttgcctgccatcagttcgccaagtgtgtagctgaccagattgccggtcttgttgcctacaccatagatattagagaactgcatccatacgaagttctgaccgatgttcttgcagtagtcctctacgataagtcgacaagcatgctttgcaacaccatacatcataccgccagaagtctgctgaaggttagagaggctgaaggttgcgttctcagcaaccgtacctgcacaaaggtatttcttcacgctcaacttcttgcagatgttggcacaatcgacagccatctggatattggcaagctgaacggtagggtctgctttctcagctccgttgacacctctccaagcaaggtggtagaatgcatcatattcgccagcaggaatcttgtcggcaagagctgcatccacacccggctcaatcttggtgatgaggtcggtagcaggcagacggtcgcctgcaaaagtaatatcaacggcaaccacctcaacgttgttggctaccatcttcttgatgagcgaagagccaataaagccgttcgctccggttatgataactttcttcattatttgaataagagtttatttggttattgaggttatcaggttatttacctaaaaactctgcaatctgcttatccatacaagcacgaacatcgccaccagcgagccagcacttgctccactcaacaatcttctccatggcttcatcgagattccaacgaggagtccagccgaaggtggtcttcagcttagagcaatcaagtttaaggaagttggcctcatgaggaccgccatcgtacttgttgatccaacgcatgccctcaccccacttggtaacaaagaggtcaacgagtgcacctgtctggaagcaatctacatcatccggacctacgttatagtagtcggcatacttgctatcctcgtactgcttcatggcgattacgagatatgcgtacagaggttccagaacgtgctggtaaggacgagtagagaacggattacgaaccacaatatcctcatgctttgcagctgcacgaattgaatcaggaatgatacggtcattagcaaaatcaccaccaccgataacgttacctgcacgagcagtagatataggaatgataggctgtccgtccttgtcggtaaagaaggaacgcttgtagctgtgggtaacgagctctgaacaagacttggagttagagtaaggatcatatccgtccaactcctcgttctcgcgatagccccagttccattccttgttgagataaaccttatcggtagttacattgaggaacgactttacacagttcgattggcgaacgcactctaggatattgactgtacccatgacgttagtctcgtaggtatagacaggatccttataagagtcacgcacaataggttgagctgcaaggtgcagaacaatctcaggttgtgcctcatcgaaagcagccttaagagcagccatatcgcgaatgtcaccaatcacagagtggatgtcaccctcgatattagctatcttgaagagcgaaggctctgtaggtgcttcgagtgaataaccggtcacgatggctcctgcattggcaagcatcttgcacatccaagaacctttgaagcctgtgtgacctgtcaggaacacacgcttacctttatagaattcaaatatattttccatttctttggttactgagtttatcgaagtattattttgcgtaatcaggaatttctggaacaacacgatcccaacgcttccaaggagccttatcctcggcaaggagtttctcgagcatgctcttctcgcggatgttatccatacactgccagaagccagtatgtacgtaagacatcagttcgccttgttctgcgagctgtacaagagcagttttctcgaagacacatgaatcgccaccagggaacatgtcgaatacctcaggctggagcaccatatagcccgcattgataggagcgccatcagaagcagacttctcacggaatgctcgaacggcctgatccttggtgatatccagtacacccttgtcctgagccatcttgacggcagtaagtgtagcgagcttaccatggctcttgtgaaactcgatgagcttgtcaatctccacatcacacacgccatcgccataggtcatgaggaaaggctcgttgcccacatactgttggatgcgcttgatgcggccaccggtcatggtattgtagccggtatcgactacagttactttccaaggctccatattggtctgatgaacggtcatctcgttcttaccattgcggtagtcgaaggtgacgtcagaattgtgaaggaagtagttggcaaaccactccttgatatactcctgcttgtaacctgcacagatgataaactcagtatgtccatagtaggcatactccttcatgatgtgccaaagaataggcataccgccaatctcgatcattggcttgggtttgaactggctttcttcactgatgcgtgagccgaagccaccggcaagaagaactactttcatatagttttgactaagtttctaattactaatgtttggcaattttcataagttctcgtaaatacatatcagcaacaatctcgtctgttaactgattgacagttttcctcgcagcatcagctattgaatctaattcgagacatgacattgattctatcctgtcgagaatattttttaattccgtgtaattgcctgattcgcacaaaaaaccatttattccatcttgaataatcccatccattccttcgccacgcgacgctatggtaatacagccgtttgccattgcttcaatgtatactaatccgaacgcctcaccagaactaatcattatgaaacactttgtttcttgtagtaatttacaaactttttcgcgagggacacgaccagcaaagtttaccatttgtgccatcttgtacttttgcgataaagcctttaaatcactctgcattgctccagttcctatataattaataaaataagagcctttgtcattctttaaagcttcaagtaaagcctcaggatgctttctttttaccataataccaacgtacgtataaattcgtcttcgacttgagacagagtctacctcattaggtattaacgcttgaggtattcccgaatagcacataaattgctgtttatcactaaggtcaaactgttttatacaatcttggcgaataggttcagaacggtatccaattaagcttattgattttaaagcctcaatattagcagaggtggctggtggtgctccatgcgctatgaatgctaccgggatattatatttctttagtaacctacttattatattaagacctggtctgtcccagtgtatagaaataacatctggtatataactattacttttaacaaagtcttcaatctgttttgcatgctgattaagactcttgtcagtataaagactatgaggataagatttgtaaattgatctgcgatgaacatgcacaccctctaacacatagtcatcatcttttagtggacgtgttaaaaaagaacctccatacttgttttgtatgagattcttgcacatcatcaataaaggataaacaatttgagggaatttggggacactatgaatgacatgaacgtcatgtcctgattttacccattgcctagcaaaataatgaaccacaggagttatatcctttggaatatccacgccaggataacatgctgtaattattaagattttcattggatagtattgttcaggaatttaacgattaaatcggaggagacttgtttcgattgcatattgatatctattctatcagcttcctccttatctatataaaaaggagtagtatctatctttacatctatacttaaataattaacaaatttatatgatttgagattataactatcttttactaagccatccttaacaaaatcataataatagcatcggattggcaaatatattgcctcaaaaaatattgttgaatttgcagaaatcaaaacatccgtacgttctaatgattcaaggcacgactcttgtttaggagatattacctcaatgcctaattttgcaaacttatcacaatccacagataggttaggatgtggtctaaataaaaatctgcaatgtttagtactatcgttattttttagcaaacagaaaagttcatacactttctcgatatcatcaagcaaatttgctgcaacaagaatattaataccttggtgctctatccttttcatttttatatatggatcaagccttggtgaccctaataatatcttcttcgtaaaatctgcaaatcgatacagatggagagcatccgtgccttctaaaagtgcataatccgttttaatggtaggatataaaggacttgcacttgcgtggggtaaataaacagtaggaatttttaaatcatgggcagcaagaactgacgatcttaaaataggatgtgatggattcgttattacaactgacttaggtctgttttttgagaagtaccttttaaaggatttgtaataataataataagctgcagcattgtaaatttgtttccaagatgtgttagatctcttaattatgtaactcacttggaatataaaatcccagaaatacaccaaggcaggaaaataaaatatcctagaatttgatatattcgcagaatcaagcctaggcctaattaccgctattgaatcgtcgactaaaggagaaacagaacgcatttgattctgtgtcaaaacaatacatacagtcttgcttgaaatatcaggattctctttgaaaattgaagtgattgttattaaaatttgatttaacaacttacttacaattaaaataatcacttttaatgatgaagctcctgatataattatatcattgctctgttccttgcataagatttcgtcataaagtttatgaatatatgctttcatctgattgaatattattataagacaaacttaacgacaatgctaacattataaaataaggcggtagagcataagcaacctgggacacattaaacaaatcttcacccgtatatacaacaaaggaaaaacataaaataccaataaacaagatagaacctaacattctcgttctatttttcatttctttgtagcttctaaatgcaatgaacagcaaagtgtaaacaagccagataagagccataattcctctttctgctaaggttgtatagtacatactatgtgcatttgagtagttaccagctctacctgcgtatttaaggttaaaatttgcaaagcctattcctaaatagtgagtatcttctgcaaaatcttttgccgtagaccatatctcgtatcgctcatcctcctttgctgattcgaacatatttgtaccctgatttgtaaaacgatcagatataacttctgtaatatctacgccagaactaacaatgttcacaactattgacaaacatgcaacaccaacaagaattttaatcatctccgttttattttggaatggattaaatattgtaactaatagaagcatgagcaatactgccatatacattgttcgtgaattgctaagtaacaatatcaaaaatattccaagagtgaatagaattaatcgtttcttagtaagatttttttttactatactatcatgtggcaaaaatagcaatgggaggaacataaaaacatttgtcatcaaaattctatcgcgaaaaacacccaatccggatcctataccatatataaataggccttcataatcaggatcatattgaacaactccacctctgaaaaagttaaatattgagattacaaagaataatcctaagacaatgaagagatacttaaatattacactcaaaatagtgctctctttatgaatgttacaatttagcactttgcttgcaataagggcaaatatagaaggattgacgacagacagccaatagccatttaatgaccttatgaagtcctgagtattaacaaattgaaacagattaaccagtatgtacaacgacacgaaacgaactattagcctgtttggcccgattccaggaatctttttatagatgagtatcagtataaatgcctgtatatactccaaccatacacgtttaaatggcaactgtctatatgaaagaactgtgtccattttgtactctgggaaataaatatactgcatcatcggggagaaggtcattaaaagcagcacaaatcctactacaccccaataatctttagaagacaacgatgaaaaaaccaaatatataattgtaatatatatacagataaatacaatttcaatcataaattattcctgattttattcaatagaattaatattgatattgaaaatataacttttatatataaaggtgtttgcattataaaaaaagcgacaactaagagggcgtgaagagctataaatatattccataccttataaggtaaaatatacaactttcttgttgaaggtaggacatatcccaaatacccaatcgctaaaaatgaaagatatgttataatagcagcagatgtaattccccataaaggaatgcacatacaatagccaaggaatgcaatcaggccaccagtaagagatattttcatcaaagacgctgtcttctcatagtaaaacatagcggaagtaacggcaagatacagagggcggtgtataaaacctgcaactaaaatagaagcaatccaataagtgcttgataaatcttcattccgtaccattactagaaagatctctcgcgaccatataataaatccgcatacagcgatagaaaaaaataccagagattgcttaaatatcctgtgagacgccaggatattaccacgcttcagttcttccataaacatgggagaaatcgctgaatttacggcagaggcaaacaattcaaaatagctcatgaattccgaagcaaaattaaattgacctattgcacttagcggtgtattcgctctatccattacaaacttatttgatccattaatcaaatatgtagaatacgcatgggggattgtagggagagaaactttcaacacatgtttaatagcctttaggtttaatatgtaggaaggtttcaagcctaatctatgatttaggacataccaatatgacgcattaatacagaatgtacccaagaaagagctaatataccagcccatatagccactttctaaatatactataaatatcagattggaaaaaactgttatcaacccacacgctaaactcctgaatacaacaggcttaggttcctgattaagcctataatacatagcacccagaattgcggatggtccaaaaaagacattgttaaaattcgctaatattattattagccaacgattttctatggcctcttctggaattataaagtatagaaggacggattgaagaatggcaaaaagaaccatccaatattgtaggaatccatatacctgtctccagataattttataatgactaccgtagtgatagaaactgcttgtgataaatgcagtacaccccaaagttgagaaagctgctatagctgtagtataggctacaatagttccggcgattccgtaatcgacagaagtaagatgcatagtcagcaagggtagcaataaaatgcttacaaccttagggacagctggtacaataccataatatgctgtattcttgagaagtttagacatgaattaatgatatttttttgcagaaactaactcttcataatgtgctatgtctctatacttaaataccttagctggtacacctcctgcaataccgcacttcggaatatctttaaccaccacagcacctgcttgaataatagctccgtctccaattgatactcctcccaagattatgactccatatcctaaccaaacattattaccaatgataacatctttatgaatcattgttgagtcatatggtaatgcttcaccttcaaaattatgattagatgtaataatacgacaatgttcaccagaatggaaattgtcaccaaaggttacattacccaaaccctgtataattaacccattgaaattaggatttaaccccaggattgtattacgagtcaacatagtaggtgccggtcctaggaaaagttcccctcgatggcttttcacatggcgtaaaagataccatcgaaagaacttgcgaaacaacttaaagctgaaaagcaattgcatcataatcccttgattttaacgtatatgtcattcaaatgtcccaattgttccataataggacacaaattactcgtacaattctcaacaaaagctttcgtctcaagataaaaacctggtttaaattccttatccaaatggtcatcaatttcaacaggagtgatagtgacactacctatattctgtatctgaagttgttccattggacgaaggtaaagacgatgcttagctgttaagatttcaacaccccaacgacctggtgcagcccagtttgcgcaataattgaatagtgcgcccttttctgtcattcctgctccagcaaaagccgcaggcttatgccatgagagctccccagaagtaaagcaatttatctgtacaggatttcctccgaggtagaaagcgagatctataacatgggaagaatttgcatacatccaattctcaagatctcccttgggtttatccatcttttctataacatgtccccattcagtgaattcaaagttaaaagattttaccccaccatcttccgcgattatctcttgagctttaaggactgaagcaaagaatctacgattatacgcaaggtagacttttgcatgattggcttgcgctaccttaacaacctcttcgcactcctcaggatatagaaaaccgggtttttcacaaaatatctcttttaccccatactttattagttgtatggtgttctgactgagggcgctaaggtttgtagcaacaatagccttatctgctactcttggattagtacttaaaaatgcttctaatcctccaataacaatatctctccctacaacttccttatacttctgtgcgcttgtttctccacggccaataacagtataatcatagccaaggctgttcaacacctttccgtattcttgtgcaatcaatcctgcaccaataatccaaatattcatacgctttattttaataaattaggttatcgggcacgattcagaagtccagcccttaattttattgataaatggtgcaatcttgctaagatatgcgacatggtaagatgctgattgttcataattagcaagcctacaacttcccttttctagaagctcgtctatcaatattccggatagaccactctgatagtgaacaggtacatttttaagttctccattaactacgatttctcccttaccctcaaaatactcaattatattatttccattttttataatcgaacgagacacaccatcaaatgccgttgttgatgttaatctcaaaacgctaccatttgcagttgtaaatctctcggtaccatggatttctacataaccaggacgtttgctatcaacaacctcctgctctaaatcatctatacaaaactcaaaagatgctgcaccattcaatgccataaaaatgtcgacaaagtggatagtattgcagcacatgccccattcgccaccttcaaaggtatattctacaggtaattcaggaacaataagagacttaatatattcatagccctcccacatacgtcgaggacagttaacccacgtcattacccctttctttttaagaagctcatctatttcggaataatcgcttagcttcgggaaaaggaacttctcgagcacaagatatttaacactatgcgttgaaagcaactgacttacaattgtgtatcgaggcttagaactagacgcaactataacaacatccaattctgctggaacaagatctaatgagttaacgaaatgagcagttttattatcagactccacttgattatatctctcttctgcaactgccaatgaatcttcgcttaagtcataaacccatatatcaagttcgtgttttgatgtttttacaccctgtagatgacggctacctaactgccccgcacctgctattaaaaccgttttcatgtataatctattttatatgttttactaattcttttgctttttgatattcctgcggattgcctatatcaatccaggttccattaagagggaaacggataaccttataacccttattcataagcatatccatgaagtcggtggcattgaagaaatctccttcaggaataagctcgaggagctcgcgcttaataaggtagataccagcattagcataataattgtaggttggcttctccaatacgcccttcacattacggccatccaattcgaatataccgtaaggtactgatatagtgtaaggaacagcggcaatactcatatcggcatcatgctccttgaagtgaaggaaaaagtcctcatagtcgatattagtaaagaggtcactattcatcaggaggacagtatcattgtagaagtgctccacgaacttgatactacctatggtaccaaggaacttaggttcacgaactgtctttacctgtacgttgcctcttggttctgcaaagtgctcttcgagttgctctttgaggtagttgacagttacagagagatgacggacaccatagctgatgagacgatcaatgttatagtcaataatgcacttattaccaacctttagcaatggttttggagtcttctctgtaagcggacgaaggcgctcgcctttgccaccagccataagaacggcatcgattggtagataggacttctgcttcttcaggtttacaacatccacaatctgcatttgctcgttgaggaccggaagaagttcaatgcctttttcttttgcaatgtggatttgtttcacatcataattgccagctttgagataagtaaacttcctattcgcaacatcagagacagaagatgaaagattctttccgtcgattaaacttcttcgaacatcaccatctgtcaaagtgcctacaatcctattatcagagtcagaaacaaatagagtaaaagcctcacctctttcaattgcatttattgctttaagagcatccaataaacttgaagactctgagattatatatctgttaaacatggtcatctattttttagaatcgattcaattaacataaagtcatagatatcatctatatctacagatgattccttagacataacatattttacacgtttagtaaaaccgccaagtcctttctctttgagtgcttcaatattgattacatagatagcaccattaaactcatagaaagtaggaagtgcctgtcgaccttcagcttttttattgtatacgagttctacataaccatcttcgttgtcgttacagagaacagcaggtgcatgtgactttgttaccgacactaccatatcaatctcatcactatagagcagcattgcttcctttacttcatccactttacgtagaggagatgtaggttggagaagcaacatgcggtcaaagtgcttgcctttcttctcgaagaaatctacagcatggagcaacacgtcattggtagtagcggtatcggtagcaaattctgccggacgcacgaaaggtacatgcagcccatagttctctactgcatcgatgatcttctggtcatcagttgaaacacaaatattttcatcagatgtgatagcacgcgccacatcaatgctatatgcaatcagtggctttccgcaaaggtctttgatattctttccagggagtcctttgctgcctccacgagcaggaatcactaccaatatattgttgtccataaacttaaagattatagaatttcttttgttgtaattgttcgagaggataggtggagattaccttgaaaatagcatctgcagtaccctccttatcgtatgggtttgttgtagtcttgcaaaataacttaaactccggtgaaagaactttgttcaagccttcaataaccgaagccttgtctgacttgcaatctacagttgattcactctttgtgcgaccattttggcgatcaccaatattgagggtcggaatgtgtgcagaaggaacttcgagtatgccacttgagctattaccgataactgcagacacatactgcagagctgacaaatatcgcttcataccaaggctggcaaacgctttgcaacgtaagttcttagcacaatacttttcaatagccgatttgatggaatctccaccttgatcagagtttggcatagtgaagagaacacgcatctgagggaaagcgtctaaagcctccaggaaatcctttatctcaccagctggtgtgcgattaccaagagttacaggatgataggtacacatgactgtattcacgtctaactcgtattcaagagttgcttccaactcatcctttgtcatcagctgtactcgtttcagattttcaacaccgatggatccaacattgaacacgcgttccggttgttctccaagttgaataacacgctggcgatattcctctgtagaagtaaaatggagtgaactcatcttggtaatgcaatggcgaatactatcatcaatagcaccctctgatacctcaccaccatgtaggtgtgcaactggaatacgaagaagcatgcagacggttgctgcaatgtgcatctcgtaacgatcaccaagaatgacagccatatcaggagccaactgactgagtgcctttgtcataccctccatctctgttgacatagatgcgagaacaccttctgcatcatctgaaggctttggcattggcacctttgcatcaatggtgaaaccatctgcttcgatctccttgtatgtatttccatattcaggcatcaagtgcatattggtggcaatgacctgaagctcgcaagactcactatacttaactagacgcatgagtcgagaaagcaaactatattcagcacgggtgccagttataaaacaaatctttctcatagcacgatcttgtcttcttcttgataatccttgatagctaccgtacctagaacctcattccatcgcataggattaatgccattacctgggcgcttgacagttaggttatcctctgtcagcagttctccctttttgatagggcgtgcagctacgatactcttgcgagcaatctcgatgttcttacgctcagattcagaaatggtcttgtgacctgtacctaatgcctgctcgatattacgaatagaagaaaccatagctttcagttcatcaggttcaagagaagccttgtggtcgggtccctccatgtttttatcgagagtgaagtgtttctcaataactgtagcgccaagagcaactgcagcaataggtacctcaataccctttgtgtggtcagaataaccaatcttgacaccaaacttgttcccaatctcgagcatagcatggaggttgacatcctgataaggagttggatattcagtattacaatgaagtatggttatatcttcctttttgacaccttcttccaacagaacattgaaagcagcttcaatatcataaagttcacacataccagttgataagatgacaggttccccatatctcgcaatctttcgaatgtatggataattagtcacttcaccagatggtattttccaaaaaccaatattaaaggatttaagaagatctatagttgataaatcgaaagctgttgaaaaaaactttacacctctttcgttacagtaatctataagtacccgatggtcaacttcagaaagttcaagcttcttcagcattgccaactgactttcgtctgccttgccaatatttcgttgttgatattctgcctgttttgctgattttgagacaagtttttcacttttaaatgtttgaaatttgatataatcaacaccagcttcagcggcttcatctaccaacttttttgctaactcgatggagccattatggttgactccagcttctgctatgattagtactttctccattatgctttgattttgaggatggcaggattgcctacataaatacccttttgactgattgacttgcgaacaacagaacctgcacctatgataatattgtcaccaacctcaatgccattagcaagaactgactggcttccaacaaacacgttctgacctatcttgcagtcaccattgaccatagtgccggttgaaatgtgacattggtcgccaacgacagcatcatgttcaatgttggtgaatgtattgaggataacgttatttccaatctgtgcaccagcattcacaaaagcctgatgcatgactactgtaccttcgccaagagttgcgtacttggaaacgtgggcggttgatgcaacgatagtagccaacttgcctccagcttcttttaccttattatatagtttgatgcggagggcgggattcttgataaatccaacggtaatgacaaattcggccttttctacatattggggaatatcatcatccacaccaataaccttgtagtcaagaaccagtttgccaagttcttcagggcgatcaacgattccgaggatagtgtagccagcagattcagccacctcaatgactgatttgcaatggccaccaccaccaacgagaatgagattcttttgttccattatatagggttcaaaaggttacaatttatttagagatcttcaacacgtatgcttgaaggaatatttactacacgatctgcaaaccagatggtgttctgaaggccatcgttttcgcagttctcaaacataggaagtctgttcatgagctcccaaattggacgtgtcacgacgccattatcgttagtctgctggaggaagtcgagctgagcctctttatccttcagtacaactgcagagagccagtagttggagaatgtgttctcgggttctgcgaagaaatcgataccatctacattcttgaagtgctcaatatattcagcagccaccttgcgcttgctagcaacgtacttatcaagtttctcaagctgtgcgcaaccgagggctgcattgatgttaggcatacgatagttgtagccgatgtggtcgtgacggaactcccaacgatgaggaacctttgcctgtgtggtgacgtgctttgcgtacttgcccaactcctcatcattgaagagaagcatacccccaccaccagtggtaatggtcttgttgccgttgaaagagatagcaccaatgcgaccaaaagtaccagtgtgctgacctttataagtagagccgatagactctgctgcatcctccacaagttcgatgtgccactccttacaaagagcagaaacctcctcgatgcgaacaggatgaccgaaggtgtgcatgggtacacaggccttgatgcgacgaccggtattcttgttgtaacaagcctttgtatcctctgtgagtgggtactgaggtgttgcgtaatcggtatgcgaaaggatgtcggccttagcgatattcttggtctcgcgcacctctgcattcttgatgagccagtccttcattgcatcaggagagagacccatggttgttttgtccacatcgataaacacaggatgtgcaccaatgtacgaaagagcattgcaagttgcgatgaaggtgagtgcctgagtgagcacttcatcatcacgctgaacgcctgccaacatcaaagacatgtggagagcattagtacccgatacgcacactacagccttcttggcaccggtgtactttgccatctcctcctcaaagcgatctacgaacttgcctacagatgaaacgaaggttgtgtcgatacactcgttaaggtatgctttctcgttaccttggaagacaggtactgccaagggggtaaattctttatttccataaaccgacttaataaagtcaattgtattcttataatctgccatagcggtaaatgttaattgataacttattaccttattatatattacatcttctgatcgaggttctttcccttctcctcatgctcaaagttagggataaagcgcttgatggattctacaacttctgccttggtgaactcgggtgatgcgaagataccttcaagttctgtgaagaaggtattgacttcgttcatgtcgcgacgagtggtttcctcaacgacaccaagagccatgaagcgttccatattgactttctccccagggacatagaactcttcgtaagccttctcaccggtggtatcggacttgaagtaaacgacagggtattcctctgaatcgtagctgatagcgttggcctttgcctttgcttctgcatcgttggcgcattctacctttttgaggccttctgcctttacgaaatcatcgcagatagcagagaaggttagcatctggtcttcgccaagttttgggaagaacacttctccaccattgccgaggatacaagcgagcatacagatttgtccggactcctcgggagagacgaaatagcgcttcacgtcagaaggtgctgccagaggttgcttcttctgaagacgatgaatccatccgtcaggcagtgagccgttggagaaggctacattggcgaaacgtgcggtagtgaccttgaagtgactgttgtatgccatcacgagatcctccataatgcgcttgctggctcccatgatgttgacaggattggcagccttatctgtagacacgcagaagaagtgtttaggaggaaagacggccagaagatccatgagcttcttggccttgatatcgttgttctcgatgagagcctgaacggaatatttatccttctcggaacgtacgtgtttgtgagcagagaaatttgcaaagatgtcgaagcctttctcctctcggaagatgcgctcgaagataggatcagcgaagttgagggtgtaacagcgaaactcctcaggtacgtagagaccttcggtagagcgcacgtcacgaacgagttctgcgagtccgttttcgttgagatcaacaacaacgaccgatgcaggttcgaaacgaagaactgccttaatgaagctggaaccgatagagccggcaccacctactacacacaccttcttacccttgatttccgcggtaagcttctcggcatttgcctgaatgtccgcctcgaacattgaaacaggacgaccggtgacatagtcacctatgaatttactgaggttgaacatttgtatatataatgtttttaattattatcgtattgtgctggatgatggtatcgcaccataagcacagctctacttgtacatccagtaaaaagaagatgcgcgttgcttagataaaatctttatgtgcgggtaatcattgaactaaaactccacgcatcttcttgtaagcactcttagtcgcgacggaaaatatcgcgtgtgtagactttttcctccacatcgcccagacattcgtcaaagcgattggcgatgatagccttgaacatctccttgaacttggcgaggttattgactacctgcgaaccgaagaaggtttcaccatcgtttagcgtaggctcgtagataacgatatttgcccccttagcctttattcgtttcatgataccctgaattgcactctgacggaagttgtccgagttggacttcatcgtcaagcgatagacaccaatagtaggaacttccatttggcctgcatattgattttgggtgctatagtcgtcccaaccggccatacgaagaactgcatcagcaatatagtcctttcgggtgcgattgctctccacgatagccgtcatcatgttctggggtacatcttgatagtttgccagcagttgcttggtgtctttaggaaggcagtagccgccatagccaaacgaaggattgttgtagtgggtgccgatacgaggatcgagaccgatgccgttgatgatggcggctgagtcgaggcctttgacctcggcataggtgtcgagttcgttgaagtaggagacgcgaagggcgagataagtgttggcgaagagcttgacagcttctgcttctttcaatcccataaacaaaactgggatgtgttttgtcgctgcatactcttccatgattgcattatctgcagatggaccttctgctccttctacaaggagttttgagaaagtctcggcagcctccttcatgtggttaccctgaatcttgcgaattgcttcattctcctcttcccattctgcacccatcattttggggaaaccaacgatgatacgactgggatgtagattgtcatagagcgccttgctctcacggagaaactcgggggagaagaaaatacgaaacttgacatcagaaccgcttgctttcaatttttctgcatactttacgtagagtgaacggcaataaccaacggggatagttgacttgataaccattgtcgcttcaggattcacctcaagcaccaagtcaatcacatcctcgatatagtgtatgtgtcgaagaaattcttgacgggatcatagttggtaggagcggcaatgactacatagccagcatcgactcaagcgcattcaaataatgggattccattatcattctttctatgtccgtggcataaaagtcaccctcacgattttttcgattattcatttcatgctacgttttagtttacgcggcaaaaatatgaatgatttttaactactacaatacggtctaaaatgactgcttacttttacccgtttattagtcccgttgaaaaatatcacgagtatagactttttccatcacatcatccaagcaactatcataacggttagcgatgatagcatggctcatttctttgaattttgccatatcattcaccacttgactaccgaagaaagtatcaccgtcttgcatggcaggttcgtaaataataatagatgcacctttcgctttgatgcgtttcataattcctagaatggcgctttggcggaaattgtcagaattggatttcattgtcaagcgatagactccaatcacgcattctttttctttttccttattatagtcattttgttcgctataaccataatatccggctttagacaggacttgatcagctataaaatcttttcgagtgtgattactctctacaatagccgtcatcatattctgcggtacgtcttgataattggctaatagttgtttcgtgtctttcggcaagcaatagccaccatacccaaaacttggattgttatagtgcgtaccgatacgtggatctaggccgactccatcaatgatagattgcgtatcaagacctttcatttcagcgtaggtatccaattcgttgaaatagctgacacgcaaggcaagataggtattagcaaagagctttacggcttccgcttccttcaagcccatatataaggtatctatatcttctttaatggctccttcttgaaggagtcgagcaaaagtatgtgccgcttcttccaaatgacttccagctatcgcttttatagcctcattctcttcactgaacagtttaatcattttgggatatcctacaatgatgcgactgggataaagattatcataaagagctttactttcccttaagaattccggtgaaaacaggagattgaatttacgtgtagtgtcccaccctttttctttgaatttctttgcgtacttcacatagagactacggcaataacctacaggaatggtactctttatgacgatagtggcctctggattgttttcaagaacaagatctatcacatcttcaagatgatgggtatcgaagaaattcttctgtggatcgtaattggtcggagcagcaataatgataaaatcggcatctttgtaagctgccgctccatccaatgtcgctgtgagattcaattctttctccgcaaagaatttttcaatataatcgtcctgtatgggtgagatgcgatgattgatcttttccaccttttcaggaatgacatccacagccatcacttcatgatgctgagccaaaagagtcgccatactcatacccacataacctgttccggctacggcaatcttcaaatcttcaaattttcgcatattatacttactttattttactctttacttgccctattttactcttcacttccctcatgttctccataaccatatccatacccatagcgtttgccatacccataatacttgccatatttaccatagccatagtaataaccgtacttcttcttctgaagatccagaccattgatagcgatacagagattaggcagtttattattctcggcaagctcattgatcaaagtaaactccgccttgcgggtgtaatcggcacggcagacataaacggataaatcagctacacgtcctatcagtaaagtatcggttaccataccaacaggagcggtatccaatatcacgtaatcaaaattcttctttaaagattcaatcgctttttccagtccttcacgagccagcaactcggttggattaggaggaaccgatccaccgggaaggatagacagattcttgctgatatcagatacctgcaccaagtccatcagatccatagagggattggtcaagaactgggtgatgccgcgctcctttctagagatgttgaacactttattcaagccgggcttacgaatgtcgagacctacgatgactacctttttccctaataaagaaaggctgatcgctaaattggaggagacaaaggactttccctcaccggaaatggtggaagttaccaaaaccacatttctttccttttcaagcatgaattgaaggttggtccggatattacggaaggtttcgctcatcagattgttccgattctcaaatacagcgatagagccctgcttttcgtccgccatcgggatatcgcccaccacagagacggtggtcagtttctccacatcggcacgaccttcaatcttaaacttagccaaggctaccagatagatgatgccaaccgggatgccgattcccaataccagtgaaataagatagatcatcaggggcttgggcgaaacgggaagggcatccgccaaggcctcgtcgattatctttgcgttattcgcagtagcggccaatgtgatggcgttctcctcgcgcttctgaagcagcattaggtaaagacccgccttgatttcctgctgacgggcgatgctgacaaattggcgttcctgcttcggagcatcgttgatgcggcgggtatagcggcttgcctcacgggctaagtcggctctcgtaatctccaatcctttcagggtcgcgtccaaggtggcttgcacattgctacgcatggcgtgtatgctggtgttcagattgatgatggccggattgttttccgtggaagtgcgcaacaggcgtttacgctccaccaacatttcgttgtaacgggcgatggcaccggccgaggcggcgtcactcaaaccgatgttgccgggcaacacctcatattccgctcctgacatatagcgttggaggtctttcaccaagttgatttgtgtctggttctccacccgtttcttttcgtattcagcgtttcccgtcaaggcgatctgcgcctcgctgctcaaatcggtgatgccgacgctgcgcttgaaattttccaagtcctgttccgtagtgcccagctccttggaaatgatgccaatacgctcgtttataaattcagccgttttctgcgctacttcatttttatcgttgttggcgttgatgttgtacatctcgagcagcttgtcgatgaagtctttgccacgacgggtactggaattgttcagcgagatgaccgctacggaagtcgttttagacgtggcggcaatggataaagagttggtatatcctttcgctacagaagaaggccggtgaatgaaggccgtgatatgacgctctgtggtcacactatccggacgaaccgatgttaaagtatcgctgttagcgaaaaaagcgaccgttccttcatcagtggggaacacagctggtaatttatcaaactgtttctgatattctttttctcctaccgtgatctgtacatccatcgcacccgacggttgcagaatcatagcgacttccataggcttcggaagattgtccgcctcctggggggtaaggctcaccgtgatgggagaagtgcggtagagttctctgacgggaaactcatccttatctttataggtgacaaataagttcagccgctcgacgacttctctcgccagtgacttggactttaagacttctatttcattgtctacgttgcttgacgaggagacaaatccgtccagtcccattttttccagttcggaggacatactagcgcctcctcctttcttgtcgtccttgatcaggacggtggcggatacattgtaaacaggtgtggccagacgcaggtatccccacgcggcggcgacacatatcacgaccgaagccacaaaccacggccaatggattaaataacggaaaaggagttcctgaatatttatctgctcttcaggctgtgcaccttgttgttcttttctttcctcaatcatagggagattatctgaagatggttactaataaacttgccagagacaccaggatggaggtggcggagaaccacaggctcgtactgttaccgatatccgaattgcgcgctttcgccttgttgggggtcacgtaaacgatgtcattctgctgcaaccagtaataaggggaaagaatggtctcagccttattcagatccaacgtcacgatttcctgctttccgtccgcaccttcacgaatcagtctcacgttgtcacgaagcccccagacggtcatgtcgcccgccatggccagtgcttcgagcaagttcactttctcattgctgatggtgaatgttccgggacgggtgacttctccgattacggagattttgtagtttaccatacgaaccgttactatcggcgtttcctttatatagggttccagtttttccactatcatttgttcagcctgtctcttggtcaaaccgcccactttcaattctccaaggacgggaaaatttacctttccatcgttgtctacaaggtattgttgcaatgaaggctgggtggttatctgactcttgacagatatgcttatagggctggctaccgtcaagttgaagggtatggccaactccggactggtgcacgaaacaacgatggtcagcaggtctttcggcataatcttggcgtcatacagggttttcttttgagatgtccattccaccgactccgcatcctgcaagtagggtactttcttgtaggactgacaggatgcgaacagggagatcgccaccaaacaggcaatcacatcgcgccccatttttcgcacactcgtgtgcatacaaaatgatttattcataaaatagataagtttattattctttatccagcacttcaaacttcggagagtttttcgacttgaattcaggtaccaccttcttcatcagtttcactgtatccagaatcttcaccgcacgagacagtttttcaaactcagcgtatgtatcaagaatatcagcgtattcatatctccgcactttcgctatcatgattttctgattttccgtcggaatcgtattttccttatcgcttaatacctcttcataaagtttctcaccggggcgcaagcccgtaaattctatttttatatctttatccggacgataaccggccaattctatcatacgagtcgccaaatcgacaatcttcaccgcctgtcccatttcaaaaacgaaaatttcattcccctctcccatggtagccgcctccatcactaggcgacaggcttcgggaatagtcatgaagaaacgaatgatatcaggatgggtgacggtgaccggaccgccattctctatttgctccttgaagcgggggatcacggacccattgctacccagcacatttccgaaacgggtcgtaataaatttagtttttcctttcacttttccctcacgaatagcacatcccagactttgaacatagatttcagctaaacgcttggaacagcccattacattagtaggatttacagctttatccgtagacaccataatcatcttttcagcaccatattccacagccatatcagccacctgacgagaaccggtcacattgacaagtacagcctcacaaggattttcttccatcaatggtacatgtttataagcggcggcatgaaagacgatttgaggatgataaagatcaaacaccatacgtactcgctctttcacacgcacgtcaccaatcaccggaacaaaatctatatttggatattttttctcaaactcaagacggacattatgcaaaggtgtctctgcagagtcgaacatgataagtttctgaattcccatctgcactaattgacggcaaagttcactaccaatactgcctgccgcaccagtcaccaacaccacttttcccctgaatacttctgcaacctgacgaaggttgatattaatttcggcacgacccaacaaatcctcaatcttaataggacgtacccactgatgaaagtttccatcagaatccgcttcactgatagtaggagctatcaatgttttaagttcattgtttttacaatattccagaaggcgtttttcttccagacgggtatcttcataacgggcaaacagaatccccttaattccgcgcttccgcatgatataatcaacatccgattcattttcaaagtaataaacgggaagatctgccaatcggcgtcggctgttatttttgccatatacataaaaaccggctaccttataatgggcactatccctaagacgtaacttcaaggctacactctcttcattagtaccataaataagaatacgtgtgttctttttattcacccaatccaataaaaaatcatagacgattatcaatgatacacggaaggttgtcaagatcactaaagtcaataaaccatcaaatagaagataggatattttataattatatggcaattgggtctcatatacaactccaaaagaaataatgaccaaacaggcaattttaaataaaacggcacacatgatacgccaaagttcacgtgcctgtgagaaacgaattgtattacgataagtatggaataataaagagcccgcaacacttgccaccaaagaaacgcaagcaaatttacagagcatccagtcggtcattggaacatgcgccatataatgaattaccgcataagcgaccaacgaacataatacagaaattgccgtgtcaatacctaaaataacccaataactgaaataatttttgcgggcatattgcactatgctcttcaatgtcttttccattatagtataaatgaataaagttgtgtgtctgaaatataatcacatattcaaagcttcaccggttccacatacccaaccggcatatccgcacaagcacaccccaacatattcaaccggacagcaatcttactcctgccatccaccgtgacaagttctcctacaagaccagtcaaaggacctttgacaacacgtactttttcaccacgtgccaaaggagcgctattcatacagattgcctcttcggaataatcgagcataaaacggaaacgggccatttgttcatcaggaataatagtcggactgctctcaccgcgcattaccatataccgactaactgtagaaaaggaaagaacctctttacgttctttaggatcagcatgtacaaaaaccatcatcggaagcaacacggactcaactactttacggcggtcactccattgatgtacttcttgctggaccggtacaaaattttcaatccctattttgtctaaacgctcggctactttcttctcatgatgcatacggaccagagcgacataccagcgtttagagtgtgctacgccttcccctgtcccaatactaggcccagcacttaaagtttctttcgttagaatcatacttttttaccccttatgtttccgttacttcttaggtaacggataaggtactcattcacaggaaaacagatgaaaacagaaaaacatggacaagaaccgcctacagcaatgtttttctaacctacgcgaagggaaaagcatctttgaaaacagaatataggaatatcgggcatgataaaacaaaaccatcatgtcctgatatatttttgttgcatatttcaacaaatcagaaaaaaaagaagattttacttgtttactatttgtatttttgcatatctttgcaccgaataattatccgttacctaagaagtaacagaaacatttcgcccttgatttctaatactttatcgtcaattatctacctaaacgatagtttctaatgtaagataaattccctttatttacctctgtacgttctcttagctcaaaaccttttaaatagatttgtgtggtttttatagatttatgtcccaatgattcactaatcatttcaattggcactccacgatacttggctgtcgttgcccaggaatggcgaagtgtgtaagaagaaacgggagaattcaaacgtagagctctcgccaaatccttcaaactattattgaatcttcgaagagcagactgatattcacggtatgccctttcatcctttcgtttcttgttaccgcaaagtatgtcgaacagatagttcggacaatcgggaatgggttcctgattatttcggagttgattaatcattcccctggcagtatcaagcacttccacgctcatgggagttttcgtcttgattcgattataacgtaatacactctgctctaaagctgatttttccagatgcgctaaatcggcgaatgacattccacaaaactggaacatcagggcggcaatagtttgtgtgcgacgtaaacgctccgatttgggatcctcatatagaagtttgtgcaattcaccggcaggcaaagctttcttttggcggacatccacgcctgtatagacatcatgaaataatcggggaacataaggagcactacccgcttccactccccgattgtaaatgctacgaagcatacgcatatacgtagaaatcgtattaggcttcaaaccacactcataaagatactgaccataacgtcgtaaacgttctttggtgacctgtctgaacgacatattcaacgtaccacaaaacttactgaaagaataaagggcattcttatagacatgcgctgtagaataacgcccctcctttcgtaaacgattgatgtagttctccccacatcgactaaatccatttttattcatcatttgcatcactagttattttatatatatactatttggcaagcggcaaaagaacaaatctttttgcacgtttaattccgctttccagatattatttttagaattaatatatatttaaccaacgttaaaattagtagattatgaaaagtaaaaatgccaaaaaaggtagtaaaaacggcaaggtgaaaagaaatgtccaaacaatgaaaaaagcccccaggaggcattcaagggaagaaatcatcagtgaagaagaactggataacagaatagcaatcgatggagatatccgtctttatttcaccatgtatttaaaaatctttattgatggacatttccgccatcccaagaaaagaaagctgataaatctagcccaatatatctatgaccaaaaagtattatacatccacaaacacggtggctataagttaatggaacttagtagtatacatgctgaattaggggcattgagaaaacctgttgaagaagagtacatgaaagagaaaaaggaaaaaagagaacaagctgaaaagatcaaaagcaagtactaaaaaaaataatgggacagttggaatataaggcttaccttcgccgccgttttcaaccggtcgaaaactaacagattttctcttaaaaaaatagtgacggtatgctatcgttatagcgtcactataatgaaaggatagtgacgctatgacaacaacataccgtcactatctataagggaagatttacgctcaaacagaaatttatttttcaaaattaaaaacagaagaaaatgagacaaaaaatcaggaaaggcaagttagaagcttgcaaattagtatggaaaaaacgtattactgctgaaaaggggatttcggataaatgtgcggagagaattgtacaagagtgcattaaactaatagatcgcatgttgtatgggaatgtagtgatagctttttacaagcaggatggcacgttttgtctggaaagaggaacactggtaggatatgaaaaattcttccatagagaattcaatatcacagcaaaacaagagtctattctctattggagtgaagaacaaaaaggatggagaagatttatgatcgggaacctgatggagtggagagctattgtataagttagattaaaatatattgaacaatgaatatgattaataaagggataccttattttccgacaccggcaaacttctttgacgaagaagtgatggaactattagaagctaagtttggagtattagcttcttacattgtcatgcgattgctttgtaaaatatataaagagggatattatatctcttggagaaaggaacaaaacctgattttcgtccgtaaagtgggcggcgggatcaaagaggacatgatggaaaagattgtcgacctattattggaaaaaggatttttccataaggaaacctacgaaaaatacggcatactcacttcggaacagattcaaagggtgtggtttgaagctactacacgaaggaaaatagatttctcccaactaccttatttattagagaccaagaagaaaaaagggatgcaaaaagaagagttgaacgcggaaaatgcagacatttttgaaactcaagaggaggtgagtcaagaaaatgcagacatttcccgacaaactaaactaaaggaaactaaactaaattctgaagaagaagaaattaacgatgcttcgattgaaattccggggtatgcctacaatctggctacacacaacatagcaggattgatggagagtctggacaaccataaagtgactgacccaaaagagaaacagacgattctccggctatcggactatggcaggaaaggcacccaggtgtggaaactgctctccaatacggcctggagtaaaatcggagcaccggggaaatatatcattgcagcgttagctagcggacggaaataaaccgactgattaaaagctgataaaaaaggtacgaaaaatctgtgcttttcacaaattcttcgtacctttacgctccggtaaaacaagttctatccacataaaagataacaaaatggaaaacagaagtttagtaaccattgccgaacattctaaagaaaaaatcctctacatgctcgaaatggcgaagcagtttgaaatgaaccccaatcgccggttattacaaggaaaggttgtagcaaccctgttctttgaaccttccacccgtacccgcttgagttttgaaacagctgccaaccgtctcggtgcacgagtaatcggattctctgaccccaaagctaccagctcttccaaaggggaaacacttaaagacacgatcatgatggtgagcaactatgcagatattatcgtcatgcgacactatctcgaaggagctgcacggtatgccagcgaagtagccccggtgcccattgtcaacgcaggtgacggagccaaccagcacccgtcgcagacgatgctcgatctctactctatctacaagacacaaggaacgctggaaaatctgaacattttcctggtgggtgacttgaaatacggccgcaccgtacattctttgctgatggcgatgcgacactttaatccgactttccacttcatcgctcccgaagagctgaaaatgccggaagaatacaaactttactgtaaaacgcaccaaataaaatacgttgaacatacggattttaccgaagagattatcgctgacgccgatattctgtacatgacccgtgtgcaacgcgaacgtttcaccgacctgatggaatatgaacgggtgaagaatgtatatattctccgtaacaaaatgctggaaaacacacgtccgaacctgcgtatcctgcacccgcttccccgtgtcaacgaaattgcttacgatgtggatgacaatccgaaagcatattatttccaacaggcacaaaacggtctgtatgcccgcgaagcaatcctttgcgatgtattaggtatcacattagatgacgttaaaaacgatattttattatgagcgaaaataaacaagcattgcaagtagctgccctgaaaaacgggacagtgattgaccatatcccatccgaaaagctctttaccgtagtgcaactgctcggtgtggaacagatgactagcaatatcactatcggattcaacctcgacagcaagaagctgggtaaaaaagggatcatcaagattgcagataaattcttctgcgacgaagagattaaccgtatttcagtagttgccccgcacgtcaagctgaatatcatccgcgattacgaagtagtggaaaagaaagaggtgaaaatgccggatgaacttcggggcatcgtgaaatgtgccaatccgaaatgtatcaccaacaacgaaccgatggccactatctttcatgtgatagacaaggataattgtatcgtaaagtgccattattgcgagaaagagcagaaacgtgaagagattacaatcctctgaataaacgtatagccctatgaaacaggactggaaaccaggaacgatgatctatccgctgccggctgtactagtcagctgcggaaaggaagaaagcgaatataatatgttcacagtagcatggacgggtacgatttgtacaaacccgcccatgtgttatatatccgtacgtccggaacgccattcttatgacattatcaaaaaaaacatggagtttgtcatcaacctgacaacgaaagatatggcttttgccactgactggtgcggagttcgttcgggacgtgattatcataaatttgatgagatgaagctgacacccggacagtgtacggtggttagtgctccgttgattgaagaatctcctctctgcattgaatgccgtgtgaaagaaatcatctctctcggctcacacgatatgtttatcgctgacgtagtaaatgtgcgtgcggacgaccggaacctgaatcctgaaaccggaaagctggaactggccgaagccaatccgctggtatatgtgcacggaggatattataatctgggagagaaaatcggtaagttcggttggagtgtagaaaagaagaaatcataaaaagtgcgatattgccatgaatatgctgcgtaaattcatccttcccggtttgttagctatagcctgcacggctgtcggccagaactataacgcagaaaaagtagaccgccccaatacaaaaaaaataaatatcggtatcaaggcgggattcaactcttccatgttcatggtgtctgaactgaaaattaaggatgtaactatcgatgaggtgcagaataactacaagataggttatttcggcgccctctttatgcgcatcaacatgaagaagcatttcattcagccggaagtgtcctataatgtaagcaaatgtgagatcactttcgataagctcggttcgcagcatcctgccatcgagcctgattatgcttccgtgcaatcggtgttgcacagtgtggatttccctattttatacggctataatgtggtgaaaaaagggccttacggaatgtctatcttcgcaggccccaaacttcgctacttatggggaaaacacaatgaaatcacttttaagaattttgaccaaaaagggattcacgaaaggctgtatccgttcaatgtcagtgcagtgatcggtgtaggcgtcaacatctcccgtatctttttcgatttccgctacgagcaaggcatcggaaatatctccaagtccatcatttacgacaatatcaattccgacggcagcacaggagtgagcaacattattttccgtcgccgtgacagcgcgttaagtttttcgctgggattcatcctttaagaataaaatatcattaaatccggctttttactaacatttttcttgtacttccttcattctttatttattttcattaactttgtgcgcttaaaataggtatctcgaattagaaatttaatcttacttataaaagaatgaaaagagacgacatcattttcgacatcatcgaaaaagagcatcaacgtcagttgaaaggaatcgagcttattgcatcagaaaattttgtgagtgaccaggttatgcaggcaatgggttcttgcctgactaacaagtacgcagaaggttatcccggcaaacgttattacggaggttgcgaagtagtagaccaaagcgaacaaatcgctatcgaccgcctgaaagaaatttttggcgcggaatgggcaaacgtacaaccacactcgggagcacaagctaatgctgctgttttcctcgcagttctgaatccgggcgacaaattcatgggattaaatcttgcacacggcggacacctttctcatggctcactggtaaacacttccggtatcatctatactccttgcgaatataacctgaatcaggaaactggacgcgttgactacgaccagatggaagaagtcgctctacgtgagaaaccgaaaatgattatcggtggtggttctgcatactctcgtgaatgggattacaaacgtatgcgtgaaatcgccgacaaagtaggcgctatcctgatgattgacatggctcaccctgccggcctgatcgctgccggagtgctcgaaaatccggttaaatatgcacatatcgtcacttctactacacataaaacacttcgcggacctcgtggtggtgtcatcatgatgggtaaggatttccccaatccgtggggaaagaccactccgaaaggtgagatcaagatgatgtctcaattactggattctgccgtattcccaggggttcaaggcggaccgttggaacatgtaattgctgctaaagcagttgctttcggtgaaatcctgcaacctgaatttaaggaatatgctaaacaagtacaaaagaacgctgctgtacttgcacaggctttgattgaccgtggctttactatcgtttccggtggtacagacaaccactctatgttggtcgacctgcgtagcaaatatcctgaactgacaggtaaagtggcagaaaaagcattggtttctgccgatattactgttaacaagaacatggttccgttcgacagccgttcagctttccagacttccggtatccgtttgggtactcctgctatcacaactcgtggtgcaaaagaagatttgatgctcgaaattgctgaaatgatcgagactgtattgtctaacgtagaaaatgaggaagttattgcacaagtacgtgcacgtgtcaatgagacaatgaagaaatatcctctttttgcttattaaaaaacgatttcaaagctaatagcttcactgttatcagctttatttcttatttataaggtctgctctttgtgaaaggagcaggctttttttatttattaacggtcccgcccgaaccatctgtccatattttcgtttttcttactataaaagaaatatatgatgtcatatatcactcatagcaaggacgaattcaaccgtacagtgtgcaagaagagaaaacagaagcgcactggactctatatacagtcatccccgtctttccacattttatttcatagggaaagacggggatttattttaccggcatcataccggaatatttttttgaggtatatattttagctcaatccttctatttctccatccacaatatcgatgtgcaatgcctgcggctccttgggtaatcccggcatacgaagaatttctccggcaatggctacaatcatttcagctccgttattgataacaatatctttaatatggaactcgaagttgtttaccgcaccataaatctttggatcggcagaaaatgaatattgtgttttcgcaatacaaaccggataatgagtaattcccattttctcgatcagtttgatacggttgcgggcaatactgctataagtaataacgctggctccgtaaatattagtggctaccttttcaatcttctgctgtatgctatcttcttctttataagtgtagcgtaaagattcggacggattgttctctatggtatctactaccagacgggccatatctactgctccctctcctccttcactgaacgcattgttaatggcgaaacccactcccaactgttcgcaatgttcgcgcagtaattccatttcttcatccgtatcggatgcaaacttattgaaagctacgatgatggtctgaccgaatgagcgaaggttacgaacgtgtttgtcgagattacgcaatccttctttcaagccttccatattcggctctttgatacggtcgagactgacacctccgtgcatctttaatccttgtgccgtagcgacaatcaccgtgagacgtggttggagtccgctcttgcggcatttgatattatagaatttttctgcaccgagatcggcaccgaatccggcttctgttattacataatcaccgaaagacattgccaatttagtggccagaatagagttacaaccatgtgcgatattagcaaacggaccaccatgtacaaaagcagcggttccttcggtagtctgcactaaattaggatggatagcatctttcaacaacacagtgatggctcctgccactcccaaatctttcacagtaaaaggttggtcgtcatacgtgaagcccaacaggatattttcaatacggcgacgcagatcactcacatctttggaaaggcaaagaattgccataatctccgaagcaggagtaatatcgaaaccggactcttgggtaatcccgttcgatttaggtccgaggccgacaacgatgctgcgcaacgaacggtcgttcacgtcaagcactctccgccaaagaatttctttcaatccgaaaccttttgcctggttctgatagagataattatcgagcagggcggaaatcatgttatgggcagaagtgatggcatgaaaatctccggtaaaatggaggttaattttgtccatcggaagcacttgtgcatatcccccaccggctgctcctcccttcattccgaaacatggaccgagagacggctcgcgaagagcgacaatcgcattctttccaattttattcaatcccaaagcgagaccgatagatactgtagttttgccaatgcccgctttggttgctgtgatagcagttaccagaatgagattgcttttcttcactttctcttcatcaatcagttgttcggggatctttgctatgtagcggccataattctccacttcctcacgagggattccgataccttcggcaacttgcttaatcttcttcagctcaatactgcgagctatttctatgtctgatttcatacagaatatgattagttttatttttgaaggaacaaaagtataacaaaaaagcgaaatagagaaatttaaagttcgacggatattatatctctatttttcataacacaacaaactctttttacgctataactgttgtaaatgacataacctaaaacaacaacttaattatggaatggattattaatcaactaagggtacatcctgaacttgctattttcctgacgctctttgccgggttctggcttggcagactcaaaatagggaaattctccttggggacagtcaccagcgttcttctggtcggagtattggtcggacaactgaatatcactgtagatggtccgatgaaagctgtgttctttctgcttttcttatttgccgttggctataaggtaggtccgcagtttttccgcggattgaagaaagacggcctgccacaagtgggatttgccgtactgatgtgtattgtcagtctggtagccccgtggatactggccaaaatcatgggatatcatgtaggagaagctgccggactgttggcaggctcacaaacaatatccgccgttatcggcgtggcaagcgatacgatcaaccagctgggaatcagcgatgcacagaaagccacgttcatcaatgcaattccggtagcgtatgccgtaacttatattttcggaacggccggttcggcgtggattctggcttctctcggccctaaaatgctgggtggactggataaggtgaaggccgactgcaaggaattggaggctcaaatgggaacatcggaagctgacgaacccggattttccccggctcttcgtccggttgtgttccgtgcttataaaatcaccaatgaatggtttgacaaaggaaagaaagtcagtgaactcgaagcttatctatgtaaaaatgataaacggctgtttgtagaacggattcgtcaaaaaagagtggtgaaggaagtagatccgaacctgattcttcataagaatgacgaagtggtacttagcggacgccgtgaatttgtgattggagaagaagactggatcggtccggaagtgattgatgcacaattactcgacttccctgcagaaactcttcctgtaatggtgacccaccggacttttgccggagaaacggtttccaaaatcagggcgcagaagtttatgcacggggttagtatccggaatatcaaacgtgccggaatcaatgttccggtattgcctaaaacgattgtagattcgggagatattctcgaacttaccggtcttaaacatgaagtggaaagtgctgccaaacaaatgggctatattgaccggcctaccaaccagacggatatgatcttcgttggattgggtattttgctcggtggtcttttcggtgcactggctattcatctgggaggtgttcctatcagtctttctaccagtggcggcgcattgatagccggacttctgttcggttggctacgcagcaagcatcctactttcggaggtatccccgaaccttctttatgggtattgaataatgtaggactgaatatgtttatcgcagtggtcggtatcgccgcaggtcccagtttcattgccggattcaaggaagtaggcgtcagtctgtttatcgtcggcgcattggcaacggccattcctctcctcgccggattgctgatggcgagatacttgttcaaattccaccctgccctgtcattgggatgtacggcaggagcacgtactacaacagctgcattgggagctattcaggatgcagtggaaagcgacacaccggcattaggatatacggtgacgtatgcagtcggcaatacgctcctgattatctggggagttgtcatcgtactacttatgtaaaactatataaataaatatcattatggaaaagaaaacaaataaccctgccattaccaaaagttatgccaagaaaatggaaacgatcagcccgttcgagctgaaaaacaaactgatcaatatggcagatgaaagtatcaagaagatagcacataccatgttgaatgccggaagaggtaacccgaactggattgctaccgaaccacgcgaagccttttttctgctgggacaattcggcctttgcgaatgtcgtcatgcgttttcactggaagaaggaatagcaggtattccgcaaaaggcgggaattgctgcccgtttcgaggctttcctgaaagaaaacgagaaagctcccggtgctaacctgttgaaagagggctataattatatgctgatggaacatgctgccgatccggatacgcttattcacgaatgggcggaatcggtgattggcgaccagtatcctgtgcccgaccgtattttacattttacggagttaatcgtacaggattacctggcgcaagagatgtgtgaccgccgtccgccgaaaggaacttttgaccttttcgcgactgaaggaggtacagcagccatgtgttatctgttcgattctttgcaagagaatttcctgttgaaccagggggatgctattgctttgatggttcctgtgttcactccttatatagaaatcccggaactgcgacgctatcagttcgacgttaccgaaatttctgccgaccagatgactcctgacggtttacatacctggcagtataaggatgaagatatagacaagctgaaagatccgcggatcaaagcgttgtttatcaccaatccgagcaacccgcccagctatgcacttagcaaagagactaccgaacgtatcatcaacattgtgaagaatgataatccgaacctgatgattatcacggatgatgtgtacggaacgtttattcctcatttccgttcattgatggcagagttgccgcacaatacgctttgcgtttattcgttctccaaatatttcggagctacaggatggagaaccgctgtgatcgctctacacgaagacaacatctacgacaaaatgattgcccgcctgtcggaggagcagaaatcaatattaaacaaacgttattccagccttagcctgcaaccggaaaagatgaaatttattgaccgcatggtggctgacagccgacaaattgcgctgaatcatactgcagggctttccctgccccaacagatacagatgagtttgtttgccctcttctcgcttttggataaagaggacagttataaagccaagatgcaggaaattattcatcgccgcctgcatgcattgtgggataatacaggtttcacactggtagaagatccgctgcgtgccggatattattcggagattgatatgctggtatgggcgaagaaattctatggggatgacttcgttacttatctgcaaaagacctacaatccattggatgtggttttccgcctggcaaacgaaacttcactcgttctgttgaatggtggtggctttgccggaccgaaatggagtgtgcgtgtgtcactagccaatttgaatgaggccgattatgtgaaaatcggacaaagcatcaagtgtgtgttggaagaatatgcccaaacatggaaagcatcaaaagaatgaactaagtagttcattttataaatgagaatttaattcagacagaagaacataagaacaaaaaataaaatagcagttaaataaacaacagaaataattttcaaagcgcagcatttatgttcttttgttcttatgtctgaaatttttctcgctcttatgtctaaaaattaattagcgtttatttaaaacgggaggtatctacttcttcccttttcttctctttgtatcccccaaacttatagttaaacgaaacgccgaatgtacgggtggtccgcatataatggttctttacattctgcaatccgtagcgaacttgtgtcgaaacggtagaagtgttgaatatatcatcacacttcaaggttagttgtgcttttccttttgcaaaggtgtaacgaagtgccgcatccaggtttcccgaacggggaagatcgaaaataccctggatggctctattttgatagaatccggtcaaagtgaattttaagtcgggttttgtggaaagggtaaaggtgttgttcatcgtcaacacaaatgtatatagtttacggtcaaacgggatatcccaaaaatcactgtctttttggcgatagcgaaagccgatggctgtaatacgggagtccagccatttttttaccttgaagggaactgtcatcattaatccggcctgcgatgaaaaatcaaagttgaagagcttgtaaatctccaccaaacgttcaggtgactggtaaagggtttgcatttcgttgttttttgtatagctataaaaggcagaaaagacgtacttgcttttcaatatataagtgaaactcgtttcatagttcgttgcaggtttaagatagggattaccttgaatttcagaataggctcccatgtaagaaatagagttctgcacgctccagtattcaggatattccttatcactactcaatgagagttgcaggacatgtccggcggcaggcatataagtcagattagctaccggatagaggctccatccattccagatatctgtatgatattgctctgctgccagggaaacatcggccgagagtttatcgccaaagctcttattcagtcctgcataaacattcagggtttgttcgcgacggcgggaggccatattattatccggcagtaagtggtctgtttcaggatcgtaatatttctggtaactatggtctaaggcggtcgtgtaagccataccataattcaatccccaccctttgcctaaggtatgttcttgcccggcataaaaacgccattgattgatttgttgtttatcgcggcttaagaaattcattgtctctgttcccatcgtgctatataataattggctgccaggagaatgataggatgtaaatgccactccagctttcagcccgaaaggggtttgataatctaactttgcgttatggagctggctgtctccctgtgaatcggtaacagagttttgcgcaccggtagctatggaataatgtttggaatcggtaaaagctgttgtgtagaccaggcttaacagatgatcttctgctagagagtaatccattccgagacgtatctgatgactgttggtacgggaagtcattatttcatccatatccatctgatgcgctgaaccatcggctaatgtgtgaagtgcttctttctccgtaatccttcggtcacgatcataagagtaagagtaaagaagatctgcagagaatttacgtccggagtacagaagacttccacgttctgccaaagattcgtagtgatgttggttaaaagctgtatagagttctccttgaagggaagatgcttgtcctgtgccgggtgctaatatcaggttaatcatcggtccgcgtacctgatagcgtgccggagcggaatacatcacttccgccttttcaatccggctgacaggaatcgattttaataaagcatccaattgttcggcagacagagtggtcacttttccgttgatgacaacagttacctcctgtcctcccaacatcagactattattcatatttactatacccggaagatttttcacaacatcataggcattatccacaggcaggttgcccaccagtctcggcacgtcatacacgagtttgccttgttcggctttcacgatagggcgttcacctataatcatcacttcgggcagttcctgaaacaaactatccatataacctatattcttgatactgtcgacaggttcctgtgactgttgtccgacttgtgctgtagcggatatccacacacatagaagagacataaatagtaaattaatccgtttcatttcgtctttatttttggaatacgacaaaatacggtagaaaaaatgaaaatttgcgttatcactggcttatctagtgttatttagtcttatcaaagagaagaataagaatagtttcctattatctttgtcagtatgaaattaccactaaaacatattgtcatactggttatctgctcattaatcggaatctttgtttatcaagcttattggttgacagggctttaccggtctatgaagatggaaatggagagcaatatcagagatgcgatgcggacgagtgactttaacgaggtcgtgctccgggtaaatgatttgcaaaaagataatgtggaacacggttcgctgacggtatcagccggatatgatgcggacggcaattcattagtgactaaacaaacgatttcttatacggatagtagccgtcaggatacgatacactcccggacagaaactactacggatacggtaaaggccgttggtaacgctccggaagattctacacctgttgcaagtagcgagaacgggctggatgtgttattgaaaaagcaagattcgctaaaggagctgttaatgagtattcagcagggtattcattcgggtgtggacacttatatagatgtcaacctgcagcgatatgacagtttgctcacccatgtgatgaaagagcataatctctctattcctcatcacactcttttgatttataccggaatcagtgccgattcttccattgtatataccgatacattaggtattgcgggagatagcagttatattcccagtcccaaggcaatccgctatgactatgaatttaatatgcatcacagccaacgctaccaactggtgttcgagccgatcaattcattggtgttaaagcagatgacaggtattctggtcacttcatttgtaattcttctgattctcggattctctttctggttccttatccggacgcttctgaaacagaaaacgctggatgaaatgaaaagtgattttaccaataatatcacgcacgaattaaagactcccattgccgtagcctatgcggctaatgacgcattactgaactttaaccaggcggaagagaaaagcaagcgcgaccagtatctacgcatcagtcaggagcagttgcaaaggcttagcgggctggtggaacagattttatccatgggaatggagcgtcgcaaaacgtttcgtttgcatccggaggaaatcaacctgaaggagttgattactccgctcatggagcagcaccagctaaaagcggacaagcctgtacatatcgaattggatattcaaccggaaacgcttgtcattgtagccgaccgtacgcatttcagcaacatcatcagtaacctgatagataatgcagtgaaatactcgaaagaggaagccgaattgtctatttcctgccgacagactggggggacagtaaccgtcagcgttaccgaccggggaatcgggattccacttgataaacaaaagcacatatttgataaattctaccgggtcccgacgggtaatcttcataatataaaaggttacggactaggactgttctatgtcaagagtatggtcgaaaaacatggaggaactatcaccgtaaaaagtgaaccggacaaaggaagcacttttaccattactttataaacccataaaatcatgagtaaaaacaaaattaccgtattactggtagaagacgaacagacgctcgccatgattatcaaggatacacttgaagaaaatgattttatcattcatacggcgaatgacggtgaggaaggactaagccttttcttcgaacttcatccggatgtacttgtagccgatgtgatgatgccgaaaatggatggctttgaaatggtacgtcgcatccgccagacggataaacagactcctgtcttattcctgactgcccgttcggccatcaatgatgtggtggaggggtttgaactcggagcgaatgattacctgaaaaaacctttcggtatacaagagctgattatccgaatcaaagcactgatgggaaaggcttttctcttcacagagaataaggttgccaatcattttgagataggaagttatctgtttgatcctgttgcacaaactttattacacgcaggaacgagacaggaactctctcatcgtgaatcggaaatcttgaaacggctttgcgaaaaccggaatcaggtggtcaacacgcaggatgtcttgctcgaactttggggagacgacagttttttcaattcccgaagcttgcatgtgttcattaccaaattgcggcataaactctcgcaagatgaacagatacgtattgtcaatgtacggggaatcggttataaactgattgtcaactaaactctttaacaccgcaaagtgccatgaataaaagacagttcacaggatttatgtttttactttgtacctgtaccgcatttgcgcaacaggtggaagtaaaaaaggatagcatcggccgtgcggttcttctgccaccggagcaaaagcagccattaaatatggataaggagggcttcatcttacccgatatgaatataacgccgaacgacaggaagccaaccattcaaacggatagcatgacgcttcatatatctcctcccgaatttatggatactccctggcctactcccagactgggtacttctttcgatcccttcagccgtgactataatcggtcggatattttcgggatcaatgctaacagctatttaagtacgtatagtttgcataatacgtatcctaccatggggacgcatattcaggtaggtgccatttatacgtatgcccctaatgaacgatgggagctttcaggtgggctgttcagtgccaagtacacaatgccttctttccaacatggtgccagaaatgattttggttttagcggttcggccgcttaccggattaataaatttctgcgtatacgggctttcggcgaatattctgtgaatggcgaacgaaatgcttcgcagggatatctcactcctatctatccgcaaagcggttatggcatgatgcttgaaatcaagttcaacgattatatcgaactccatggaggtatggaacgctcatacaacccgatgaaaaggaaatgggagacggctcctgtcgtttatccggtgattaaattgaaaagataagtttttttctaagaaaacataacggaagcggatagtcaggtggaaattatctatctttgtggtaaatcaacctttacgaagatgaaaaaactgattctatttctttcgctgatattatcggtcggttttgcatccgcacagtcggaaattccttccgatagtattcgtcgtgctccatctaccaatatcaaagagtttggtggttttctgctggatatggggttaatgaacgtagcaactcccgaacttcccaagtttaatttagatatgcctaatatgacgaaagattataatcagctctttcgtttaaacacggatattacctattctcaaggattcaccgactctttttcttcgtcttcttactccgggtttgccggttttggatacggatatggttggggattgtcttcttctccacagtttatgcagatgggatctttcaaactgaaaaacggaatgagaatcaatacttacggagattacaacaaggatggctggcgggtgcctaaccgtagcgctatgccttgggaaaggaataatttccggggagcgttcgaactgaaatctgccaatggtaatttcggaatacgaattgaggtgcagcaaggaagaaatgttccttattaaataataattaggcacggattacacgtatgtcacggtctttagggttatcattgctgaaaaataaccgcgttaatccgtgtaatccgtgcctaaaaaatagcaattaattagtggcaggtacttattaaaatcaggaaaatcagaaggctttgtctgccgcactgattgcattggctatacggtcacaccacgaatcaaattccggatcgggtgtttgagtttccggatgagaaagcatataatgtacagcttgccgcaatccgtccgccatagagatatggcatataaaatctgggacgagccgctttatcttcgaattatcgaaaacaaccgtagccgctttatctcctaagagttcccccctgaaatcataatgatcgctatgtttggcaaggaaatcggatgctacgtgcaatgcgttcagaggtttgcctaacgcatcggcgattgtctggtaaatctgattccaagtcatactttcatcggtagtgatatgaaaagcgttcccaatggcatgtggattcgccatcagtccgacatagcctttggcaaaatctttggagtgagtcagtgtccacaaagaggagccatcaccgggaataatgacaggttttccgtcaagaatccgtttgagaatctgccagtttcccttatctccatgtacggctacgggaggtttggttccgttataggtatggctgggacgaacgatggtcaccggaaagccacttgtccggtaggctgacatcaatacttcttccgcttctatcttgtttctggaatactgccagtagggattgaccagaggggtgctttcggtaatgcgataatcggttaatggcttttgataggcagaggcactgctgataaagatgtattgccgcgttttattctgaaacaggcggatatcacgctttacgtcttctgccgtataaccgatgaattgcgcaaccacatcgtaatgttcaagtgcgatggcttttgccacagcttcttcatcattaatatccgcaatgatactgtgaattccttccggcattttttttgagccgcggttaaggagagtaatctcccaccctctctgttgcgccaatgcaactacatctgtactgatagtacccgttcctccaatgaataatgctttcataaaacctgtttttttatattctccggagcaaatatatcaattccatgacttacttccagcaatcattgccatttatttttccgcccgcaagtttatgtagtatacagattactgattcttgtacccttattactgatttgaggtatgaaataaaaaagatacctccaaatgttttatctttgtatcagattaataacaaagcatatggatgaaataacaaaaattgaaaccgtcgatcagtatgaccagttgtttggactggagacattgcaccctttagttaatgtaatcgacttctcaaaagctaccaagtcggttgagtatatccgtatgaacatcggattctattgtctgttcctgaaagatgccaaatgcggggatctcacatacggacgtaagaattacgattatcaggaaggaacggttgtctgtatggcaccgggacaagtgagcggaatagacaaccgtaaccgaacggctccccgtaccaagtcgattggggttttattccaccccgatttaatccgtggaacttcattaggacagaatatcaaaaactatacttttttctcttacgaggtaaatgaggcattgcatctttcagatcaggaaagagaaatcgtaaccgattgcatacataaaatccggctcgaactggagcatactatcgacaagcatagcaagcaacttatcgtacggaatatcgaactgctattggattactgtatgcgtttctacgaacggcagttcattacacgcaatcaggcgaataaagatatagtcgttaaattcgagcaattactggacgaatatttccaaaatcaggtggcaatgaccgaaggactgccatccgtgaaatactttgcagacaaggcatgcctctctcctaattatttcggggacctgataaagaaggaaaccggaaaaactgcacaggaatatatccagtgccggattatcgaactggccaaagaaagaatactggaaggtgttcaaactgtcagccaggtagcttatgaactgggatttcaatatccacagcacttcagtcggttatttaaaaagcatgtcggctgcaccccgaacgaatataaacaaaaaaactagacgtattttagatacaggagtctcaacatcatgggagataaagtactcaaaataggaaccgtgcatcaatgcaattgttgcctggggagtaagacactacacccgctggtaagtgtcatcgatctctcaaaggctgacttgtcagctcatgcgggcatcaagttcgacttttatacgattctattgagtgagtgtaaatgtgaagcgtatatgtatggtcaccagtattatgatttttcggatggtactttgctcttccttagtcccggagagtctatcaatatgaaggaaaacagtaagaattttccttccaaaggatggatattggcttttcatcccgatctgatttgtggcactccgctcggacttaatatacataactatactttcttctcttatctgcctgaagaagcattacatatatctttgcgcgagaagcaaatcattctggggtttatggataaaataaaccaggaactcgaacgttgcattgaccgacatagcaagaagatagtttccaagtatatagaattattgctggattactgtatccgtttctacgaacgccaattcattacacgtaatgaagcgaataaaacgattatcaaacaattcgataaaatcataaataaccatttcgagacgaaacaggtaccgactgtcgatatactttcacataagtattgcgcgaacctgcttcatttgtctcctgaatatttcaacgacttactgaagtatgaaacggggaaatcatttaaagagtatatcgagttcaaacgcttcgagattgccaaagattggttggtgaatactgataaaacaatcaatcagataacgcaagagctgggttttcagaatccacagtatttcagccggttatttaagaaaatcacaggttgttctccgaatgatttcaggatacctaattgaaagtatatgtcaaagggattagaggaagataaagcaatcaaaaagtcttaataaaatttgaattggaatatcaaattcttaatctatgttatgaaacatactttttttcttggaatatttgctaatttcgcaatagtccgtatctttgcaatgtgtttttcatagtattagatttaaggttaacaaaggttggagcaaggcgttgctccttttttttatgtctatacgtaagctctctcctttttcttattcatgataatataggaattacgctatttttcaataactttgcaaaaagagagatgtcaattatgtctcgataagacagatcaaaaggttctctttttacgttacatataaaaagattatttaatccttgtagaataatggaaacaatgcaaccatattatcgtctgatgaaatcaatcctctttgtattatttctttcttttggcatgatttcatgtgagaaagaggatcctgtttctacctctccaactacaaggcaaacggatgactcaactactgatccgacagatcccgatccgactgatcctgttgttcgttcgaataatgaacagacggtgttcatgtatctaccctggtcgaacaatctcacttcttttttctatcagaacattgccgatttgaaaagtatcatcggaaacaatatattgaagaatgaacgggtgatcgtatttatatgtacatcggccaccaaagccactctctccgaacttgtctatgagaatggcaaaagtgtacagaagactttaaaaaactacgattatccggatcctacctatacaaccgcagagggcatcacttctattttgaacgatgtacaaacctatgctcccgccaaacgatatgcaatgattatcggatgtcacggaatgggatggatacctgtatcgagagcagtttcacgcagcagcttgcagattagtaaaaagcactgggattatgaacatgcaccgatgacacgtttttttggaggaacacaaacgaaatatcaaactgatattactacgcttgccggaggtatttcgaacgcgggcctaaagatggaatatatacttttcgatgactgctatatgtctacggtagaggttgcctatgaccttaaaaacgtaacaagccacttgatagcttctacaagtgaaataatggcctatgggatgccatacgacaagataggccagtacttaatcggaaatatagattacgaaaaggtctgtgacggtttctattctttttattcaaattatgtgactccctgcggaacaatcggtgttactgattgctcggaattagacaacctggcggctattatgaaagaaataaatcagcgttatacgtttaacgaagaattaacgggcgaattacaaagattagacggatatacgcctaccatattctttgattacggcgattacgtttccaaactatgttccgatccggatctattagaacaattcaacgaacagctgaaacgcactgtaccctttaaaaggaataccaaacagtattttacagcaatctcttcctcctactatggagaaagaattgatatcaatactttctccggaatcacgatttccgacccaagcactaatccgggtgcttcaaaaaagaacgaaacagcgtggtatattgccactcattaaatctactctaagaagcatacggtggtagagagttgattcttcacatgtggtctgtcaaatctcttaataaaaattgaattgagaaaaccaattcttaatcaatgttataaaacatactttttttcttggattatttgctaatttcgcaatagtctgtatctttgcattgtgtttttcatagtattagatttaaggttaacaaaggttggagcaaggcgttgctcctttttttatgtccatacgctagatactcctttaaacatggcatgacattatcccttaatcaccgccattggagccagctccaccaacggcttcaccaagtcccgctcattcgctatcacttgcgcaatatctttataagctcccggtgcttcatccagttcgttctgcgaacgaagtccgtgaatgataccttgctgatccattctctccttctcttcatccagtgacaaacggcgacaggcatcctttcttcccattaatcgacctgcaccatgcgaacagcttttgaaactctccggattacccagtccctcaacaatataagacttggtacccatagatccggggataataccgatctcgccctcataggcacgcgtagcaccttttcggtgtacaatcacatcctgatcgaagtgattctcccaagctgcatagttatgggcaatattaatcataggatcaaagtccgtttcaggtttcactgcctggatggcttcacaaatacgagtcatcatcaactgacggttggcaaaggcaaaggccacacagtaattcatttcacggaaataatcctttgccatctgtgtctccattggcaggtaagctagtcccgataccatttcagaataccatttctcattccaatattgcgcaatcttattatagtgattggcaaccttcaaaccaatgttacggcttccggagtgaatcatcacccaaacatcagacgtcgcggtatctttttgaatctcaataaagtgatttccacctcccagagttcctatctgcttcaaacaagcctcgtactgattcttcaaaacaggcatctcttcaaagtcgaatccttgcggaagcaattcctgatcctgctttttattctgatgatcgaatcccaaaggaacaactgcacgaatcttcgacataatggaagtcaaatccgtataactaaaaccttccgcttttagattcgtcttaatcgcacacataccacaaccgatatccactcccacagcattgggaacaatcacgctattggtagccaacacaccgccaataggcattccttttcccgcatgcgcatcaggcatgatgacaatatgtttaaatgcaaaaggcagtgaagtcaaatccatgatctgcgacatacaagagtcctctacttcatccaaccaaagtttagcgggtaaacgtgttcccataattactttttccatacatcttttcttttatcaattcatataaatctcgttatcgggagcaaagtaagaagggaagtacgaaatctatttgcgtagttgatattattttttatttttgtagaaataatctataacatctatatatagaacctaatgaagaagatattaattatcggcgccaacggattcaccggacgccagattgtaaatgatttatctgcttgtaaacaatacaagctgacgggctgctccctgcatccggatattcttcccaataacgcggaggattatcgtttcatcgaaacagatatacggaatgaagcggacgttagtcatctcttcaaagaggttcaacccgatgtagtcattaattgctccgctctgtccgtgccggactattgcgaaacgcatcatgaagaagcctatcttaccaatgttaccgcagtaggccaactggccgatttatgcgaagaatacaaaagccggttcattcatttatctacggactttgtttttgatggaaagataaacgaaactgccgggctgttatatacagaaaaagacctccctgccccggtcaactactacggatataccaaatggaaaggagaagagagagtggcagaaacttgcagcagttatgccattgtccgtgtagaaatcgtttatggcaaggcactgccgggacaacacggtaatattgtacagctagtaatgaaccgtctgaaagccggacaagaaatacgtgtcgtatccgatcaatggcggacaccaacctatgttggagacgtttcggatggagtgctacgtttaatagaacatacggcgaatggcatcttccacatctgtggcgatgaatgtatgaccattgcagagattgcctaccaggtagcagattatatgaaactcgaccgttctcttatccatcctaccaccacagaagaaatgaatgaaagcactccccgtccccgcttcagtggtatgagtattgataaagcccggacaatgctcggatacaggccccaaaagttaaaagaaattcttgcgaactgggataaattataagggaaagagcacataaccaactttttacaaccatctatctcgttccggatattcctttctctttatttattgcatatttattttgaaaatatgcaataaataactatctttgcaccaaattcaaaaaagaccaatgatgaatcaaacattacaattacataacgctactctttttcttgcaggaatacctattttctgtaagtcttgttgcgtgcatgtgcattggttcagtggattcatctaaatttcccaactatttctttacaggaactacctgctgacttgttttgttagccatagcagtattcctttctgattttcaagcagatgtaacatcttctttgaaaattcttttgtgtgttgtcaatcatcagtttaacctaaccccaaatatatacaattatgttctctattatatctaccatgtttttaggaatcggcatcggctatgtattgcgtaactggagtattctacagaagacagaaaagacaatttctcttacaatattcctgttgctctttattctcggtgtatctatcggttctaatagcctgattgtgaacaatcttggtaagttcggatggcaagccattgttcttgctgtgtccggtgtattgggaagcctgattgctgcccgtttggtactacaattatttttcaggaaaggaggcgaacaatgaaaggaagtctgatcgttatagtattcttttgtgtaggctgtatcatgggagctttcaataagttcgagttcgatacgcacacagtttccatgtacatactttatgcattaatgttacaagtaggaatcagcatcggttccaataagaacctgaaagccattgtttcacatttgcaccctaaaatgttgctgattccattgggaacaattatcggtacgctgttattctccgccctggcaagtttgctattgcgtcaatggagcgtgttcgactgtatggcagtgggaagtggatttgcctactattcactctcttccatccttatcacccaattcaaagaaccctccataggactgcaactggctacggaactgggaaccattgccctactgactaatattttccgtgagatgatggcacttcttggtactccaatcatcaagaagtacttcgggaaactcgctcctatttcagcagcaggagtcaactcgatggatgtactgctgccttccatcaccagatattcaggaaaagaaatgattcccatcgccatcctgcacggcattctgattgacatcagcgttcccgttttcgtttctttcttctgtaatctttaaccctgtccgggaataataaccttatttattaatgcccggaaacagccaatacaaacttgatatcagcataggagacatcgtctcctaatgctacctttatagcgaatattcccatgtattcatgttcatccaaatacttgcgaatcttcgctatattttcagctttcaccacctgctccactttgatctttcccgaacggacataatgctccagatgtccggcaatggttccggataccaaatcacgagccttggctatttcatctatattcattccctgacggaacatttcatagctaaccaacttcgtatctttcttcgcctccttctttttctccttctccgcctctttctcctgtttctctgcctctttctgcagcttcgtctttcgttgccttgcagtatcatcactattaccggaggagattaacagatccgtcatctccggtctttccaattgattctccgccacatacttgcggataatacccagaatctcaagcccgtatttctctactcctttcgctccaaaataaggtattgcctccaaagctcttggactatccggtagcagattcacaatccccatcaatgccttttgttgcataatcacataagcaggaacattcatctcccttgttttagctgttctccattcagacagggcacgataaagctccggatgcagaatatccgtaggaacttccacctttaccttttcagcactgcgtgtacgctctttccgttccttgcgttctttcttctctttcaaagccttcgaagaaccggaggacgtagaatcatcttcaaggctcaacattactttagccttcaacttcaaataatccgtgatagcaaacttccctcttgtagacacagcttccaacaaagactctttaatccacaacgcatcatccagcgcctgcatacgctctgccaacagctttctcaactctttattatcaagaggcatattagtcttatcatacaaagcccgaaccggttccaactccttatgaaaatatccggcaccggaacgaatccgctcctgcaactcctcattcgccgcataatcctcactctcatgtatcaaccgggtatactgattgcggaaacgttgagacacctccacaatcttctctttaacatggggagccaacgccttatattcagccaactgcttcggaaagagcttgtacaaatcctcatccataagacgaagcaaccgtttataagcctgatcgatcgaatagaaattaaacaaatcactcaacaaatcaaagaaatacgccctttgcatatcattcaactgctggctacccggcttattctgctccaccgctttggtgaaattatccaccgtagcatcacttattatggcttccctgcgcaaaggagactccaacaccataccctccagcgtcttgcaacgactcaaagccacgtaagtttgtccatgtgcaaaggaattccgcgcatcaataatagcacgctcaaatgtcaaaccctgactcttatgtatcgtaatagcccacgccaaacgaataggatactggcggaacgtcccctctatcacttcagtgatctccttcgtctcctcattcaacacatacttataattcccccactcttccgacaacaactgaaattcggatctatcccctttaccacgcaccacaatacccgtttcattaaccgctaccacctcaccaatcataccgttataataccgtttctcggacgatggatcattcttcaggaacattatctgtgctccctccttaattgtcagaagtttatccgcaggatacgaatattcaggaaaatccccctctatctcggcactaaaatgatacgccttgccgggcaacgatgccagttcgcaatcattaaccctctgtgcctgattattatgtgtcgtcagacgaatatatccctcttctttctgcggctgaaagccgggctgataacgacggttcagttcattcaacacttcatcatccgccttattctcccgaattttatttaataaagaaaggaagaacgtatcactctgacgatatactttcttgagttcaatcgtcatatatgccgtttctttcaatgcatgacttgcaaagaaataaggagtctcataatactttctcaaaaactcccactcattgtctttcacgacaggcgccagctgttgcaaatctccaatcatcaacagttgcaccccaccaaaaggtttctccctatcgcgatacctccgcagagttgcatccaccgcatccaacaaatcagcacgcaccatactgatctcatcaataaccagcaaatccatactacggatgatattccgcttttctttactataacgataatgtgtctgggaagaattaaaggttgtttcgggcacaaaaggagcaaaagacaactgaaagaaagaatgaatcgttacgcctcccgcattgatagctgcaatccctgtcggagccaatatgaccatgcgtttgggcgtatgttctttcaatcgtctaagaaatgtcgttttcccggttccagcttttccggtaagaaataaatgggtgcctgtattttcaatgaactgccaagcaagctgcagttccggattattttccatgcttttccaattttcggtaaagttactgaatattctttttctttcgtcttgatacgaaagaaaaagaaccaaaaagaaagaatcaaggctgcgtttttccggctactccggtgcttcctccggctaaagggcagaaactcgctacgctcaaacagtctgccctttttaacgccggagaaaccacctgcgcttgacgccggaaaaacgaggccggaagacctgcgggtggaagccttacaatgtgggaagctttattattaaaaaactcaccatataaaaagaggacatagaataaaaggctaatagaatgataaccgatgtagcctatgtagtataaagagacttatgaaaggtttataccccttataaaaaagctttgctatataaaaatcgcagacgttatacgactcaatatagcaaagcagaacaatatataataaaactattaacgatataacagcgactcaccaaagcaatatcagacatatcgcacagcttccccacaaacctaccctagaacattcaagcagcaacacccaccccaccaggttccccggcctacttttttctccatcaggcgagcgcccgtaacggagcgttaagaagggcagactgtttgagcgtagcgagtttctgccctttagcgaagtgaaggaagcgagtaggagaaaaaagtcagccttgaatttttctttgcttctttcttttgtttcaagacaaaagaaagatgattaattacttcatggatccccctacaatatccagcaattcgtttgtaatcgcctgctgacgactcttattgtactgcttcgtcaaatcctggatcagctcgtttgcgttgtccgtagccacttgcatagccaacgtacgtgcagcatgttccgaagcattggagtcaacagcggcagtaaaaatcttctggctcaatacagtggggattaagctcgcgattaattcctctgcgttcggttcgatgatataatcattggcaatctcgttctcctgtacctcctctttattctctctgtcctcttcacttacgacgttcgtcagattaatggggagatacgtctcacgaagaagaatctgtacccccattgatttgaagtgatgatagattatttccacccggtccacttcgcctgctacatacagatccatcagtcggtgagccagttcggcagcctcctgatacgttggtttgtcggagagcgttggagaaacctcctgcggtttgaaacccatccgtttggccgcttcatccaccttcttgcctaccgggaatatcaagatattatcctgtcctaaagtacggaattccccgatagtctgcatcatcattttgatgacattggcgttgaaagcaccacaaagagaagtgttcgaagaaaaaacaacgattgctacacgcttcacttcacgctcctgcacataaggagattcgataggcaggtccgcgcttaggaagttagtcagaatcttgttcaacttcttttgataaggcagcatattctcaatggccccttgtgccttgtgtaatttggcagaagccaccatcttcattgctgaagtgatttttcgggtactcttgaccgaatttattctggtttttacttctttcagtgaagccatagtgataattaaaaattaataattaaaaattaaagggcgatctgatttataaaaaagccaattagataaatcaaaaaccattcagatttattttaaaggccaatcagataaatcaatgaccgattagataaattgtttagtgaccatggcggcagtctcttcgatagccttaatcacattatcatcaatcacacccgttttcaatacatccaatacatcctcctgatgattcagttgcagcgattcgatgaagctacgttcaaagtcctgcaccttatccagaggaacatcgtggagcagtccgtgtgtaccacagtagagaatagcaatctgctgttctacgggcatcgggctgtattgaggctgaatcaacagctggccgttcttacgtcccttgtcaatcgtcaatgcggtaatcgggtccatgtcgctactgaacttggagaacgcttccagttcacgatactgtgcctggtcgatcttcaatgttcccgccactttcttcatagccttaatctgcgcgttaccacctacacgggatacagagataccgacgttgatagccggacgcgtaccctggttgaacaagtcagtttcaaggaatatctgtccgtcggtgatagaaatcacgttcgtcgggatataagccgatacgtcaccagcctgcgtttcgatgataggcaatgccgtgagcgaaccaccgcctttgacaattcccttcagactttccggaagatcgttcatttcgcgagccacttcctcctgactgataatcttggcagcacgttccaacagacgggagtgcagatagaagatatcacccggataagcctcacgacctgatggacggcgaagaatcagagaaacctcacgataagctaccgcctgcttggaaaggtcatcataaaccaccaacgcatgacgaccggtatcacggaaatactcgccaatggcagcacccgcaaaaggagcgtaatactgcaatgcagccggatcaccagccgtagcagccaccacaatcgtgtagtccagtgctccgtactcacgaagcgtattaacgatagaagcaacggtagaacccttctgaccgatagccacataaatacaatatacaggatcacctgccaggaagttactgcgctggttgataatcgtatcaatagcgatggcagtctttcccgtctggcggtcgccgataatcaactcacgctgtccgcgaccgataggaatcatggcgtctaccgccttcaatcccgtctgcaacggttggttcacaggctgacggtagattacccccggagctttccgttccaatggcatatcatacagttcgccaccaaccagccccttgccgtcgagcggttcgcccagcgggtcgatcacacgtcccagcatgtcctctcctacacggatggaggcgatacgtttggtacgcttcacgacgaatccctctttgatcttgtccgtcggacccaacagcacagcacccacgttgtcctcttcgaggttcatcacgattgctttgataccattgtcaaactccagcaattcattggcttcggcatttcgcaatccatagatacgcactacgccgtcgctcacctggagcaccgtaccgatttcgtcaagttgcacattggcgttgattccttcgagctgcttgcgcaatatatcagatacttcgcttacttttatattttcagacattatacaattctcctattcttatcaataaattgttgtttcactcgcttcaactgcgtggcaacgcttgcatccagtcggtagtcgttgacatcaaagataaatccgccttcgatcgaaggatctatcaccgtttcgagttccatctgggcgtgcaagatatgctctgctgcggaacgaatccggttttccgtttccttgttgacgggaacggctgtaatgagcttacccactccgatatgcttcagcttccggtagagatccagatacatcaggctgataaattgcagatagccttcacgcctgtttcgcagtaccaaagtgataaaacggacaaactctctggtcgattttccgtcaccgtcggcagccgtgcagactaacgccaacttttccttcgttgtgatgaccggattatcaagtgcttcgcgcaaaccgggctgttcacaaaaactgtgcgacagcgtcaggaactcctgatataacctgtcctccagacctttttcctgtgcatattcaatgatggcttttgcataacgcattgagagtattccgacttccatcttccttagttcttattcggggttagtacttcatccagcatacggtcgatcatgcccatctgtgcttccttgtcctcaagactcttgcggagcactttctcggcgatgtccacagaaagcacggctacctggcgacggatgtcgcggatggcttcgtctttctctatctggatttgttgtttcaccgcatccagttctttttgtgcggcaatttcggcttgtttacgggcctcgtgaacaatcttgtcacgttcttccattgcttccctcaagatgcgtccttgttctttgttggcggcagccaccaatgcgtcgccttcctctttcagtttagacaactgggcattagcctctctcgccacctccaaagactggtcgatataggtcttacgaccctccaccatcttgatgatgacggggaagccgtatttcgccaatatcacgaacacaatcccgaatgagagaaacatccagaacagcaggccactatcaggtaatagtaatgacatatcttttaattagaaattaaagactataaattaaaagctggggtgggttctcccttttagaggaagaacaccaacagacaaactactaccgccaacagagccacaccttcaatcaaggcggcggcgataatcatgttcatacggatgtcccctgatgcttccggctggcgtgcgattgcctccattgccgaactaccaatcttaccaatacccaaaccagctccgattactgcaagacctgcaccgatagctgcacctaatttactaactcctactgctgctgcagtggcttgtaacaatactgatagtaacataattttcagttttaaaatggtttatattttctcttgtttattatttaatcattcattccgcgcgtttattccgtattctttttatcaacgttttcaccgcgtttcatttcaattttcttcagctttcactttggcaccttcctgtgccagaccgataaacactgccgacaacatcgtaaatacgtaagcctggatgaaagcaaccaacaactcaagcgcattcataaagatgttgaacaatacagaagccaccgtcagcgtgccgttcagtgcaggccccatgcttgccgagataaagatcaggcaggtaagcaccagcatcgccatgtgtcccgccagcatattggcaaaaagacgaatcatcaaagcaaacggtttcgtaaagattccgaagaactcgatgaatggcatcatcggtataggcactttcagccaccaaggtacatcaggccagaaaatatccttccagtaatgtttcgaaccgaagatattcactgccaggaatgtgcagactgcaagcaccatagtgatagcgatatttcccgtcacgttcgcacctccggggaagaacggaatcaatcccatcatgttattgataaagatgaaaaagaacgctgtcagcagatacggtgcaaacttccggtagttgggtcctacacaactcttgataatatcgtcgttcaccatcatgatgaacatctccatgaatccgataaatcctcccggcgctttcgctccttgcggacgttttctgtaccagtgtgacacgctcaatacgatgatgagcaacaacacgctgttgaacagcaaagcaaatgtcactttcgtgatggaaatatcccacgggcggacctgttcgcctgccgcattatactctaccagtttgccctcgtacttacttccttcgggagcgatggaaagtccttcataagtccctccattctcttcgagacgggaagaaaggaacgtgtgccaacctgtagtgctactataaacaataataggtaatggtatagtaatgtgcgtgttaccccacgtcgtaatatgccattcgtaggagtcgccgatatgaccgaacacaatttctttcacatccaccgtgttctcctgttcctctttcggagtaatctcgtcctgcgtctgttgtgacaccgcttccccctcctgttcctgtgcaagaaccggcaagctgactgccgccatgaggcagaacagaatcaacggagctactatgttatgcaactgtttcatttttcttcttatttttctttttccgtttctgattcaactcaaaagagaagaagaaccaggtttcgaataccagatatatcaaatagaacaagataaacgtcagcagaaaggctctggcttcttcgcgaacggcaagacaataaatcaataccagaatcagcgaaagaatcatttttatcatcttcgttgccagatacaacagtaacattctctgtggagcatgccgacggcaagcgtcgaaagcataaatgctaaacagcccgaagaagtaaaaatagatcggaataaacggataccctccgaaataatgccccggcaaagcgaagtgtagaatgacagctccgagtgccccgctaattaccgcaaataaggtatgccaccaaataaaattccgtttagttttactaatattcaccatgttactgtgtttttctgtaagattataacctcgtttttttcaattttttaatgcttagtctttgtgccggtgaggagtttccgtcaggaaacacaggcagaaaccgtaccgtcactcatttcgacaaaaccgccctgaatatccatcgtgtgctcttctccgtccatcgtcgtgtaactcaacgttcccgctttcaacgacgaaacaatgggcgcatgcccggggagaatagaaaacgaaccgatcattcccggcaatgtgacaatcttcacatttccgtcgaatatgctcttttcgggcgatactatactcaaatgcagttctttcatcatgctatctttttatttttttgctgcctgttccagcaatttcttacctttctctattgcctcctcaatggttccgacattcaagaaagcctgttcgggaagataatccacttctccttccagaatcatcttgaatcccttgatggtgtcttcaatacccaccatcacacccggaacgcctgtaaactgttcagccacggcaaacggttgtgaaaggaaacgctgcacacggcgggcgcggttcactaccatcttgtcttcttccgagagttcttccataccgaggatggagataatatcttgtaattccttgttacgttgcagaatttgtttcacttgctgcgctacgtcgtagtgttcctggccaacaatgtgcgggtcgaggatacgtgacgtagaagccaacgggtctaccgccggataaatacccagctccgtaatcttacggtcgagcacggtagttgcgtccaagtggctgaaagttgttgcaggagccgggtcggtcaagtcatcggcaggcacatacaccgcctgtacggaggtgatagaacctttgcgggtagacgtgatacgttcctgcatcgcacccatttccgtagccaacgtgggctggtaaccaacagcggagggcatacgtcccaaaagggcggacacttccgaacctgcttgcgtgaaacggaagatattatcaataaagaacagaatatcgcgtttctcaccttcttttcctgcgtcgcggaaagattccgccaccgtcagtccggacaatgccacagaggcacgtgcgcccggaggctcgttcatctgaccgaaaatcagagacacttgcgatttctccagttcgttataatccactttcgaaagatcccagtgacctttctccattccttctttgaatgcttcgccgtaacggattacaccggattcaatcatttcgcgcagcaagtcgttaccttcacgggtacgttcacctactccggcaaatacagagaatccattatgtttcttggcgatattattgataagttcctgaatcaatacagtctttcctacaccggcaccgccgaacaaaccgattttaccacctttggcatacggttcgagcaggtcgatcactttgatacctgtgaagagcacctcttgcacagtagtcaaatcctcaaacttaggggggtcgcgatgaatggaatatgcacctttgcggtcgagtcctttcataccgtcgatcgaatcaccgactacgttcatcagtcgtcctttaatctgttcgccaatcggcatcgtgatcgggcctccggtgggatacactttcatgcctctctgaagtccgtcagtactgtccatcgctacggtacgcaccgtattttcgccgatatgttgctgaacttctacaaccagtattttgccgtttggcctctttatctccagtgcgtcgtggatgcttggcagcaccaattctgcatccgtaccctcaaagtacacatcgaccacagggccgatcacctgcgagatatgtccgataatctgtgacataagcaatctctaatttatttatattattcttttctctcctttttgactttataatatgaaaggaatgcacatttttcgcgttttacctatttcattattataataaacagttgagttcagtttttgttcaactattttctatatcccataaacttctgtccttagaaatagttaaagaaacaactgcgcaaatgtagaaacaattccgtgtcgttgtgcttcctttttcataatttgtcgttcgataacacttattagacctacaatgactacagattgaccaattcaggcaaatttctgctacaaatcaatagcaaaacaagtttgggggcaataatctatcaataaactaaattaacccatcgagtttcctatctctttgttaaaaatcaatggattagcaaaaacaagaaatagtggcaaaaacaactagttttgtgctcgaacacagaaaagtccgtattttcatgttttccttaagaaagtttaaagccatatttcctgtttttctcctatctattctattccttatatattccgcatttttgcattaagattcacatccatctttataaagttcccaatttgcataaaagagcaatataataacgccacatacaattattatctcatttttttgctgtaattttgcaccactaatataaaacactcaaaatgatgaagaaaatactgttactcggttctggcgaactaggaaaagaatttgtaatttcagctcaacgtaaaggccagcacatcattgcttgcgactcctatgcaggagcaccggctatgcaagtggccgatgaatttgaagtattcgacatgctgaacggtgaagagctggaacgcgtggtgaagaaacaccgcccggacatcatcgttccggagattgaagccatccgtacagaacgtttatacgacttcgaaaaagaaggcattcaggtagttcccagcgctcgtgctgtgaacttcaccatgaaccgtaaagccattcgcgaccttgccgcccaagaactcggactgaaaacagccaaatacttctatgccaaaactctggaagaactgaaagaagctgccgataaaatcggtttcccttgtgtcgttaaaccattgatgtcttcttccggcaaaggacaatcgctcgtgaagagtgccgacgaactcgaacatgcctgggaatacggatgcagcggcagtcgtggcgatattcgcgaacttatcattgaagaatttatcaagttcgacagcgaaatcaccctgctcaccgttacccaaaagaacggccctaccctcttctgccctcctatcggacacgtgcagaaaggtggcgactaccgcgaaagtttccagcctgcacacattgatcccgcccatttgaaagaagcggaagagatggcggagaaagtaacccgtgccctcacaggtgcaggactttggggagttgagttcttcctaagccatgataatggagtctatttctccgaactctctcctcgtccgcatgacacaggtatggtgacactggcgggcacacaaaacctgaatgaatttgaattgcatctgcgtgccgtactcggcctgcccattcccagcatcaaacaagaacggataggcgcaagcgctgtgatcctttccccgattgccagccaggaacgtcctcaatatcgcggactagaagaagtgaccaaagaagaagatacttatctccgcattttcggcaaaccgtttacacgtgtcaaccgccgtatgggtgtggtactttgttatgctccgcttgattctgatttggatgcgttgcgcgacaaggctaagagaattgcagagaaagtagaagttcattaatacaagaaattcagagataagatgaataaaatccgccaagtaaacctgtctgatattccagcactgcaagagctatatcagcatacagttctgactgtgaaccgaaaagattatacagccgaagaagtagcagattgggcttcgtgcggagacgatacgtcacactggaatgagcttttcgaagaacaacattatgtggttgcagaaaacgaagaaggcgtgattgtaggctttggctctgtaaacgatgacggatatatgcacacgctgttcgttcacaaggactttcagcatcaaggtgtcgcaacatctttgtataagcatctcgaagcatatgcacgagaaagaggtgcgaaaagattaacatcggaagttagcatcacggcaaaaccattttttgaaaaacaaggttttcaggtcgatgaagagcaaaagcggaaagctaatcaaatgtgtctcaccaattataagatgagcaagcagttctgttaatcacatctaatcatttctaagatgaaaacatagaagaaagctcatttgcagataaagaaagtcttattttatataagaaaaactccagctatggtgacggataaagttacattagtggagtttttctttttaacttcatgaaatgaaaacgtcatttcttactcaataaacgtttagccaaatatttacgtattggttcatcatacagcttcaaacacagataagcaagaataatactcaaaataaagacacacaaagctacgtgccaggtttcacctaacgtgtagagttgattctcaatcagccatgcatagaacagatacatcaacggataatgtatcacataaaccggataagatatatctcccaaaaacttacatatctttgtcgattgcttgtccgtggtggtacccgacgctcctatccacagaatgatagggaaagccacaatcacgcaaaacgcttcataaacaccattcatgcaaagcggctccaacccttccagataaggaacagagaacagggcaatcagcgcaatagcacatatccaaaatgcacctttcaccttcataggcttgaaattgcgcgacataagcatacccaacgaaaaagggaaaagcatacgcaaggaaccgcccaaaaagttaaccccatccagcgtccagcccactcctatgtttccataagtggagacattaaaaacagcaaacgccgccaacgctacgcccagcaacaccacaaacaccgtcagtgccttgttggacaagcggcgaatgaacaacgcatacaggatattgccgatatactcaaaaaacaatgaccagcaaggaccattcaacggaaacatctcaccgttgccacgaacttcgtacccaacacccggcatggcaggaatgaagaagatcgtacaaagcagagacaacattatcatggagatagctacgtgcgtcccgtcccattgcacactcccctgaatacagaacgtgatagcaccgagaacggcacccataatgaccatcggatgaagacgtatcaatcggcgtttaaagaaatctttcatggtgagacttttaccccaacggtcgtcgtaagcataaccgatcacaaaacccgaaaggataaaaaagaaatccacggctaaatatccgtgattcagagtttcaatagcgctattactggcaaaagcgaagccctcgaatacgtgataccatatcaccataagagccgccacaccgcgaagtccgtcaagaagatcataatgcgccttggtgtctgaaaaagctgaagcagaaatgttcgacatttgtttttctattagtaagttagtattttcagaaggcaaagatacggtttgcgctacgaagtttctttgctctaaagcaaaaaagccctgctaatcgctattttttagcacgtacccgactaagggtatagatggaaatgcccagaaaagcagccacatatttcagcttcactcggtttattaatccgggatagcgacggttgaactgttcgtagcgttctttgggcgaaagttggaggcgctccacaaacatgtggctaagctccttattcacattctgatgcaggattcttccccagttggctatgtcgatatatgtttcgtagagggcattcagcttgtcgatgtggatgacgtagattttgcaatcggaaagcgtttcaacgctttctaccgatggttgctgatagtagagcgaatccatgccgaacgtgacgtcgccctcctgactgaaccacgtagtggtgtcctctccgttgtggtggaatacagaacgggcgatgccctcttcaatgaaatataccaggcggtctgtgacgcctgcctgaacgatacgggtatctttgggataataccttaattccatattcgcctgaagcgcttgaagtgcttcgtcggaaaccggatagatttgcctgattttacgaatgatatgttccatttgggggtaatggcgtattgggggttaatgacgtactttaggatatttattattaaaacggaaaccaagaccgagcatcagataattaggggtctggaaatcctgaagattgtagccgatgtgaaggaatgaactccgggtgacgttgatcttcaacgcaaagacctgatacagtccgcgcaaatcgccacgccccagcacattcgttcccaagccgacaccgatggtaaaaaacggcatcacgtattctgcccgtccggaaagtccgagcgcaagctgattctgaatgcccggcacgagaaatttacgacgggaggaaccactgcctgcatcgtactccaccagcgcatcttcagtgtacacattagcactaccgtcataaacaccgtccagcgaaactccgaaacgcagcttatagttgagattgtacatcggagcaaagttgaatcccgctacgggatagctgcccggtgatgcaatctgcttctcgcctacatagacgcctttgcgacgccacgagccgaacaacacaaggtcataactgacgtgtcgcggaaaacggggaacgtagggatgaaccaatgatttagtgaggtcggcttcttcccggttgaagttgtacaccagtccgattttcgctccggtggtgttgacacctgcattgggaaacttggtgttgccgttggagaaatgcgtgaagtctccgccgatgataaagtcgaaataacgggaaagcgaccagttaaggtagatacccgcattgaggtaggcattcacccgtgagcctacggctccgttgtaggagttgtaatcgttgtcataaggtttccatccggcagaaataccgaaattccactcgtaattgagcgaaaggcggggattgaaacgggcaatgcgtgcaccttgaaagacatagaacgtcatcggatcacccagttgctttttgtcgccaaaggtggtgaaagccaagccgaaaccttgataagctccgccatagatgcggtcggcacaggtgttgggacgaaacttgaaagagtatttcagatgagcggcaaatgaactctggatgggtttccaccgttcgttctcgccttgcaggaaaggattggtggggaacacgtattgcggccgcgcctctatccccaaccggtgaatgaaatggtggggaacgtagggagctacagtgtcggctccgcattgcgggaagctgttgtgccggaagccatgaatttcttcctgcaatctccgcacttcttcacgaagttggcggacgtcctgctggagctgttctacgtcttgccgcatttccttcacctctttctcttcctgccctacctcctgcgcactaagcgaagtgccggggaaaagcaaagcggaacagattacggcgatttcccatctgggtatctttactctcatataatagtctggtttgtcttttcagaacggaagttacaaatggagcttctcaataaactgtgccacatgatagccgtccatcaacccatgatggcaggttacggaaacgggcatcatcagtctttctccatcacggaagtactttccggtggagattttgggaacactgtcgcccgaacgcatattggtggggtgcttcatgtcggtgaatgagagccacggcactgccgaataatgaatggcattgggatggaaagtgcctcctttgttgagtcccgtagtgacttgcaaacgttccatttctgcctttgcccgacggataaaaacgagttcgtccggatcgtattcaaaggcggcaaaagaaaaggtatggtcgtcacggcctacggtggcttcgggcagaaggctgtcatagcacaccaccttatcgccttcgatgcgataacggaattcttctaccgcagcagcggcagtcgttatccggtggaggactaacagggaaaaggatatgcctttggttttggcttcctgatatgcgcgcgtacagtctacctgaacggtcactccgaaaaacggatcgtcaaaagcactgaaatgttcgtaatgttctcttctgttccaagtagcaatatcgatgatcttctctatctgattcattctaaacactcttttttatttgagaaacgcagattaacgcaaattatcgcagatttagcctatttcctttgcggtaatctgcgtttctaaattcagactctttactgatgttgctcacgcaacaagtcgttcactgtttttaccgggttgaaagtggaaagtggcacttctacaaagacggtattccagtcgctcatcgctccgttccacaagccgggaagttcgagagctttcaggtctttgccgttcttcgatttgtaggagatgaagcctgttgctttatctacatacttcaccaggtcgaacttatgtcctttataatcgcgcacggcgcatacgaggtctaccggattgaagtgtgtgcctttctcgaacatttctttcttttccggatcgtccatgtcgatctgtgagctttcgaggatttgcagggagatggttccgtcgctgttgtaagcaaggaacgggccgccaccgggttcgcctacgttcttcaccattccgcagacgcgcatcgggcggttgaacttgtttttcaggtagatggcgagtacggaatcttcgaggtctttcgtctccggattcttgcagaagagtttcttttgcaggaattgaagcatttccatcatctggtcgtgggtgtatttaccgctgtcgagcagggtaaggtattcgaatacttgttcttgcaaagtcacgagcactccggcaatcagtttcttataagtaacggtgtcggctttcagtctgtcgggcactacgttgtcgatgttcttgatgaagataatgtctgcatcgaggtcgttcaggttctcgatcagtgcgccgtggccaccgggacggaacagcagtttgccgttgtcacggaaaggttggttgtccatgtcggcggcaatcgtgtcggtactcggcttttgttcggagaaggtgatgtaatagtctactccatagcgtttggaaaattcgtctaccttttcggctaccagcttcttgaagagttcacggtgttcggtagataccgtgaagtgcacgtttactttaccgctctttccggcagcatacaaggctccttcggcgagatgttcttccatcggcgtgcgtgaaccttcgggatacttatggaatttgagcagacctttcggtagtgcgccgtaattcagtccggctgtttcgagcagggcggataccactgctttatagttgccgtcttcgatcagtccgggaatatcttttccgtcgatacgctggcaggctacattcaggtcatcatagaaagcaaaattcttgattccgtcgaagaatgtctgttcgaacttggtagttggccggtcatagtcggcagacaggaactcgaacaggttcttgaacatacgactcgctgcaccggaggcgggcacgaacttcacaacagtcttatctgtgttggtatatgcatcccaggcggccaaataagccttctgttcttctgcatcgggagctaatattcccttttcgatggaggctgccgcatccagcttcaaaaaggggaaacccgtctggaagcatgctaattgttctacaatttgctcttccgtgatgcctttcttggcaagcaactctttgtcctgtgtcgttatcataatatctaattttattaattgatgcccaaaaatacaaaatgttatttacttcttgccgaataaccgggaaaaaaactaattttacatcgaattaacaagattgaatatggacgacttttttacatcagaggaaaaaaaggagcttttttcactctaccggcatttgttgcaatctgcaggagatagcatttcctggaaggattgcctaaagttaaagagacatcttatcaaagcggcccagtgtaacggtctgcaacgcaataacttcgggatgaatcccgtcatcagagatttacaaacggcagtgatcgttgccgaggaaatcggtatgaaaggttcgtgcctgatcggtatcatgttgcacgaaatcgtgaaggggcatgtattgtctatcgacgaggtgaacgccgaatatggggatgacgtagcaagtatcatcaagggattggtgaaaacgaacgagctgtatgcgaagagtccggctatcgagtcggaaaacttccgtaatctgctgctttcttttgcggaggatatgcgtgtaatcctgattatgattgcggatcgtgtgaatgtgatgcgccaaatcaaggacacgggcaacgaggaggaccggctcaaagtggcgaacgaggctgcttacctgtatgctccgctggcacataagctgggattgtacaagctgaaatcggaactggaagatttgtctctcaaatatacgcagaaggaaacgtactattttatcaaggataagctgaacgagacgaaggcgtcccgcgacaagtatatcgctgcttttatcgaaccgatccagaggaaggtgtcggaagcaggattgaagttcgacatcaaggggcgtaccaagtcgattcattcgatatggaacaagattcagaagcagaaaacgtcttttgaggggatttatgacttgttcgccatccgtatcatcctcgattcggagccggacccggctaaggagaagcaggaatgctggcaggtttattcgattgttacggatatgtaccagccgaacccgaagcgtctgcgcgactggctctctatcccgaaaagcaatggttacgagtcgttgcacatcactgtgatgggcccggaagggaaatgggtggaagtgcagatacgtacccgccgcatggacgagatcgcggaacgcggattggctgctcactggagatataaaggtatcaagggtgaaacgggtctggacgagtggttgacttctgtgcgggaggcgttggagaatgcagacaacgattcactgaaagtgatggatcagtttaagatggatctctacgaggatgaagtgtttgtcttcacgcccaagggggatttgttcaagctcgccaaaggggctacggtattggattttgctttccatatccatagtaagttgggatgcaagtgtatcggcgcgaaagtgaacggcaagaatgtgcagctcaaacagaaactgaacagcggcgaccaagtggagatcatgacttcaaacacccagacgccgaagcaggactggctgaacatcgtgacgacttccaaagcgcgcaccaagataaggcaggctctcaaagagatggtggcacgccagcacgcttttgccaaggagacgctggaacggaaattcaagaatcgtaagttggaatatgatgaagcgaccatgatgcgcctcatcaagcgtttgggcttcaagaatgtgacggagttttatcagcggattgccgacggtggactggacgttaacgagattctggataagtatgtggagcaacagaagcgggacagtgatacgcacgatgaaattgtgtatcgcagtgccgaagggtataacttgcaggctgcgcaacaagaggaaacgacgtctaaggaagatgttctggtaatcgatcagaatctgaaagggttggaattcaagttggctaaatgttgtaatccgatttacggggatgatgtgtttggtttcgttacggtaagcggtggtatcaagatacaccgggcggactgtccgaatgccaatcagatgcgcgaacgtttcggttatcgtattgtgaaggctcgttgggcggggaaatcggtaggtacgcaatatcctatcacgctgcgggttgtagggcatgatgatattggtatcgtgactaatatcacttctattatatccaaagagaatggtatcacgctgcgctccatcggtattgactcgaacgacggtttgttctccggaacactgacggtcatggtgggtgatacgggacgtttggaggctcttatcaagaaattacgtactataaagggagtaaaacaagttagccggaattaattccggctactctcctatcttactttcttctttatataataaggataggtaatcaatgcaaagaagagtaaagcaatggatgctactatctgtccggtatgtagcatcttatctgtatccaattccatgtagcaggcggtagcgattcccagggaaatgccgatttcggttgccagcagatgggtggtgttggctgttccgcgttggcaatggtgggatagctttacgaacatcaccagaaattccggcaggataaagcctaagcccagtcctaagagtacggaggaaatgcctatggagatgtctgtattcagtagggacatggctacgatttccaatccgagtcctataatgaccagtcgcagtgttttctctttcaggaaaaacagacgtgcaaagaacagggaaacgatgtatccgagggctgttcctacaaagaacggtacggggattcctgtgtttccgagtacgaaatcgtttaggaaagggtgtaccatgggaaccagcagtcccggaatgaaggttatcaggatcagattgatggcaggaacccatccacgaagcaataggaagcggtcgaaggaatagagtttggtgacaatcggcgcacggaaaggtacgtagactcctgataacatgaggattccgacagctccggttatgacagatacagtgagcagggtttggaaggattggctttgataaagccatactccgaggataatgcctgcgatcattcccatacgtgccatccaggagaaactgacgtttcccgcactgcgcagtgtggagttggtgatgtcgatggccaatgtgatgccggctgttgtgcctatgccaaaggcaagcccttgcacggtgcccaacagaatcagttctgtgaggttggtaacaaaggcgtatccgatggtcgccactaccatcagggcagcagcaaacatacagacgtacttacgcttgtatgcatctaccagataggcatggaaaggaccgatgaggaacatccccaaggtgaaaaagagaaagattactcctgtctgtgcagccggcactccgagacggtcggccatctctacggaaagcaccggaaataacacatacaaggatataaacaacagcaaattagctacacatatccgcataaaatgaactgtccacaatttaactgccatatactatatttaatattgttccttctcgttggggaagtagcaattcttcacgtcagaaacgtaacggctgatggcatcggtcatcaccgtgtacaagtcagcataacgacgcaagaaacgcggacggaatccgttgttcatgccaagcatgtcctgaatcaccaatacttgaccgtctacgtggccaccggcaccgataccgataataggtatggtcagttcggatgctacgcgttcggcaagggttgcgggaatcttttcgagtacaatggcaaaacagcctgcttcttctaatagatgggcgtcgcgaatcagtttttcggcttcggcgtcgtctttggcacgcacggtataggtgccgtatttattgatggattgaggcatgagtcccagatgtcccattaccggaatgccagcacatacgatgcgtctcaccgtgtctatgatttcttcaccaccttcgagcttcaaagcgtcagcgtggctttctttcatgatacggatggcagaagcaagtccttccatctcgttgccctgataggatccgaaaggcatatcaaccactaccatcgcacgtttcacgccgcgtaccacggatttggcatgatagatcatttggtcgagtgtgataggaagtgttgtcacattacctgccattacattggaagcggagtcgcctaccaggattacgtccattcccgcaccgtctacaatctgtgccattgtgtaatcataagcagtcagcatagatattttttcacctctctgtttcatttcaaccaggcgatgagtagtcacctttcttgagtcatctgatatataaccagccatgtctttttaaattaaaaattaatgattaaaaattaaaacgacgtcaagcgccttcaaaaatcgcggcaaagttataacatttaattcataacagagaaggaaatgcaaaaaatcctttcaaacacctcgcttggatagctggggaggcggttggaaggattctgtgaggtataataaaagctccttaacaatataaggaagcgatttatcaagtgcaataatgcgtttcggatttattctttctcttaacgatgcaggatcaggagcttgtcgtaggtcatgccggtgaagtcgtctattatataatgtgctttgccagtgatggcttcacgtgtattggtggtggcaagtccgatcactgttgccccggaagtcattccggcttgcaggccgtggaaagaatcttcaaagacgtaggtgttttcgggggtggcttcaaagatttccatcccgagcaggaagcagtcgggagccggtttggaacgggcaaacatctctccggtcaggatgcggtctaccattcctttaaattcggggtgggcattgtagacgttagccatcttctcttcgttggagctggtgactacggctatctttgcaccgttacggcgaagatcggctataaaggcttctactccggggatgtattcgtaggacatcttttgctcgtaaacgtagagttcggcgcttatttcaagctgggcttcgggttggtccgagaaatacttttcatagatttgcaataatgtctgtcccttaatacggcggccgaaatcttcttcattcagatatttccgtccctgctcgtcccagaagactgtgtactgcgtttctgtatccataatgacaccatcaaaatcgaagagtgccgcaatcgttttcgttgtattcatatataaactttctttttacctaaacgttaaaccttgtgtatccgtcgttgcaaagttccgaataatcatcgaatcaggcaaataattcgtacctttgcaaagctaaaaaaaacgtaacatacgtttttatccaacaaaatctactagcgcatgagcaagaacgacccacatatcttaggcaaagaaagtatcggcaaattgctgttacaatattccattcctgcaattatcggaatgacgattacttctatctataatattattgatagtatcttcatcggacatggtgtaggcccaatggcgattgccggactagccatcagctttccgctgatgaatctggtggtggctttctgtacattggtatcggcgggcggttctacgctggcgtctatccgtctggggcaaaaggacatgaagggggctacggaaatcttgtcacacacgttgatgctctgtatcactaattcgttcttctttggtattttgtctttcatcttcctggatgatatattggttttcttcggggccagtagcgagacgcttccttatgcgcggagctttatgcaggtgatcttattgggtactcctatcacttatacgatgattgggttgaacaacgtgatgcgtgctaccggatacccgaaaaaggcgatgttgacttcgatggtgacggtggtagcgaacattatcctcgctcctatctttattttccactttgaatggggaatgaggggagctgctacggcaacggtgatttcacagttgatcggtatggtgtgggtggtgagccattttgtcaagaaagacagtacggtgcattttgaggggaatatctggaagatgaaacggaggattgtggagagtatcttcgccatcggtatgtctcctttcctgatgaatgtgtgtgcgtgtgccattgtgattatcatcaataacagtctgcaaaattacgggggcgatatggcgattggtgcttatgggattattaaccgtttgctgacgctttatgtgatgattgtgttaggtctgacgatgggtatgcagcctattgtggggtataacttcggagcacagaagatagaccgtgtgaaacagacattgcgactggggattatctccggggtcgtgattaccagtagcgggtttattatctgcgagttcttccctcatgccgtatcggctcttttcacggatagcgatgaattgattgatttggccgtagacggtatccggctggctgtattgatgttcccgtttgtaggggcgcagattgtgattggtaacttcttccaaagtatcgggaaggctaaaataagtattttcctttcgctgacgcgacagttgctttatcttttgccttgcttgctgctctttcccaactggtggggattggaaggtatctggattagtatgccggtatcggatgcattggcgtttattacggcggttgtcagtctgatgatttacattaagaaagtgtctaaacaacatccggaaacggtagcggaataaagcattaactgctttactccgcctgttggtttttattctttattctgctttgatgctctttacggggttttcattggcaacgtgccaggctttcactaccacgcaagccacgataaccaatagtaccagcagggctattcctataaaaagtaacagatccatatcaattcgttcgctaaactgttccaaccatatttggcctgtaaaataggaagcggcagtacctatcagcacagagattacggagatattcagaatgtcgtatatcaatagtttcaggatgccggaggcctctgccccattcactttgcgtatggctatttccttgctgcggcgttgagtttctccattcacatagccaatcaatcccgtgatgacaataagcaggatgaagcaggacgaaatccagactgcgttacggaaacggtatacgctcttatagccttcgcgaatcatgctgtctactgaattgaagttcagggctacattcgggaatgtttttgccacacattcgttcaagcgtttcaggttctcgtcatagggttcttttagacgaacattgatggtgtgattggccgattctttatcggcaatcaatacgataggagactgactggaatagaaacttctattacgaatatcatcaaacactcccacgatggtaccttctaccccactcactgattttcctacggcaccatcggtccatttcatcaaacgaacgagttctttatttaccaatagatcgccttttttcttgatggtagtgccttctgttattctgattcccatcacattcggataatcatagtcgcacatattgaaattaagggtggcaatgcgtttgccgtcgttaccaatcaatccacgtgtccaatattctcccagtacgctgtgtgtggatgccgataccccgtccaccatcggttggcggagcaactcgtcttttacatgttctactgtttcgccggacatccaggtttcggcttctaccagtcccggaatcttgattcccatatctccattcatcaggtgagaatattgtaacagggtaaccagcaataatccgagtacaaaggaggtacccgtgaactggacaaatagtaatgaacgtttccatcctctttttccatccgtatagtgccggaatacctgcgtgacgggaatacgtgagaacagttttcccggtatgcctcctgccaggaggaaaaggactactacagtgagcaagggtatccaaatgatgtcccaggcaaacagtgaggcaaggctggttcccaacaggtcttcgatcaattcgcccatgttgattatcaacaggaagctaaacaggacggatagtagaaccaatactccggtttctgccagaaacatgccaaagatgtttccggaactggctccactgcatttatgcactcctacgctttttgcacgacgactgatagtggctattgaaatcaacatataattcatgatggctacaaaaaacactgaaaagccgaggaagccgaatatcatcaaacgtttctgggtatcggcagaatccagatggcgtttcgaaagaggaacaacgctgtattccaacttccagtcatcccattgcaaggggctgtattttgccattacttgttgaattttgctgttcaccttgtctatatccgacgcatgacgcaagcgtgcaaaggcataaaagatatcattcccattccaaccgttaccactcgcatagcgaccatcgcggtggatggtaatcacaaagtcacgggagagcatcgaattttcgggtatgtctttatagacgccgcgaattgtgagctccaactgcttgtcggccgaaagggttttcccaatagggtctgcgctaccgaatgtttcacgggcaaaatgttctgatacaaatatgctattcgagatgatgagatctttcgcgttcccttttagtacgggtatacccatcgtttcaaagaaacaggtgtcgaccatcatgtaatttgcttttgacagcagtttgtcttccttataaatatgataaaactgggaaggaagtacacaggtggctgattctatttcttcaggcatatcctgcgccaaggtaaaagctaccggatcacagacggtatagtcataattcattccgtcatcaccctgcacttcgccggtcgtcatattctgtgccgctattctcgccattatcagattctccgcttccgggtaacatttctcatagctcatctcaaaagctatttgcgagaaaagcaagatgccaactgttagtcctaaagaaagggagagcactcttacgatattcaaagtacgctcatgcagtaatgtacgtatgctataatagatttgtctcatacttgcttctgatctggtttatgctatcacactggctaccaggctgccgtcgaacaaatgaactgtacgatgggcaaaggatgcgtcgtgttgtgagtgtgtcaccatgatgatggttgttccttctttattcagttcggtcaacaggttcatcacttctgccccattctttgagtcgaggttaccggtcggctcatcggcgagaatcagtttcgggttggtcactacggcacgggcaatggcgacacgttgttgctgaccaccggaaagttgttgcggaaagtgtttggcacgatggctgatgttcatccgtttcagaatgtcttctaccatgcggcggcgttcggatgctttaaagcccaggtatgtcagaggaagttctacattctcgtaaacattcagctcgtcgatcaggttaaagctctggaatacgaatccgagtttgcccttacgcacatgggtacgttctttctctttcaatccgcccacttcttcacccatcaagcggtaggaaccttcggtggggttatcgagcaaacccagaatattcaacaaagtggatttaccacaaccggaggggcccataatggctacaaactctccctcttttacttcaaggtttacgtgattcaaggcaactgtctctacttcggaagtacggaatactttactgatgttgtttatttcaatcatactctttttatttatgtttttaattattcacttttaaggctattcaccggattttcattggcaatccgccacgatttccaaagtacgcaggctacgataacgagaagatttacaatcgctatcagtacatacgccgcccaactgacaggcacgtgctcggcaaacatatccatccacatatcattgacgtaccatgatgccgctacaccgatcacaacggctgcaacggctacatagagcacatctttcaccaacatttccagaatgccggaggcttcggcaccattgactttacgtatggcaatctctttggaacggtggcggacttcatcggttgtgtagcctatcaatcccatcatcatcacaaagaacatggtaaccgccgccagtatggtagcattgctgaagacgcggatggagttataactctcttttatcatctgctccatcgaacggaaatcgaccgttttatcggggaaagcgtctgccgatactttattcagtttctgaagattctctgcaaaaggttctttcagccggacatgaacacagtttccgaaattcttggtactcatcaggatgaagggtgcttgcgggttggtgaaattaccgatccggaagtctttaatcactcccactactttacatacgtagcctgaattatagacagtacggttcaatagctctgttccccaatgcatccattcgccgtatgtttcattgatggctacttcgttttcattccgtggcatacgcccctccttcatcaccatacccatcatctttggatagtcttccatcatttcgcaaaaacgggaggagaaaagtgattgtccactttcatcctgaatcatcgttccactataactatagacgggatgggaatcggcactggacacggactctacataaggcaggccacggaagaaagtcagggcatagtcctggttttctttattgccgaaatcagtattggctacgacaacgcgcttcggattgtatcccaggtctttgttcaagacatagtagtattgcagcatcaccacatacatcaatccgcagatgaaagctacgccggcaaactgcacgaataatagcgggcgtttccatcctttttttccttctgtgtagcggcggaagacttgtgaaacggggattctggcaaagatgcgtccgggcagtgctcctcctatgaggaacaggatagctaccgtcagcaggggtacccaaagacggtctaaagagaacagggctccgagttcaacggcggttgtgtcttctataaagtcgcggaagttcagtaagattaatcccatcaatagcaaggcgaagagaataatgatagctgtttccaataggaacattcccaggattttgccgctgcctgcaccgctacacttatgtacgccgatggctttggcacggtatgagagtgaagagatggagatcagtacgtagttcaaggtagcgataaaaaggatgattattcccaagatagacatgatgttccgcatccgcttcacgtccggttcttccctgtatacatcacggatcggctttacaaaagcggtataacctaccactttctggtcttccgcaggacgatatttctttatcaggtcattcaaccgtgcattcaccacggatttgtctgctccgggacgaaaacggataaatgcgatccagctatcgcctcccctccaggagtaatttccccatccacggctccatacggtaggcagagaaatcactgcatccggtctgacggtagcattttcgggtatgtcggcgtacgtgcctttcactgtcagttctatttctttattataggagattactttgcctatcgggttttcttggtcgaacatcttacgcgccaaccggtcactaagaaagacaacatctttctgcatcagttctttttccggaacaccgctcaaaacatcgatacccatagtttgaaagaatagtgaatcggctgtcactttgttagcttcaaaacggacacttccataataaagaggggcactcatccagacacaatagctggtggctgcttccacttctttaggaaagttctcctgtatggcacccgccaccggtccgcagttcatttcctgcggctcaaaggtttggccattggcggaaaagacggagaagatctgatacaggttatcataatctttgaagcatttgtcaaagctctgttcgaaagccacgcgggcaaacaacaggatgctcatcgtcagccccaacgccaaagagaggattttgataacgttggaaccatgcccccgcaataaagtacggatcacataatagatttgtttcatattatattttatttctgttttttctattttcaagaatgcagaaagcatgccaaaaaagaataacaattcattatcaagtgtttatcatttcaacctttctgaatattgtctaaaaattagacagtaccgtctaatttttagacaaccgggagactattccatttctcctttaaattgttccaacagtctctattatccatggggagattgtccatcccgatagaaaactttatctttgcatctagttttctaaactattaaagtaatgatgaagaggaagaatttatatgcactgttttcgtgcctgttcctttcgggatgcggtatgatagactatcatccgtatgacgtccgcatcagcggagaaacagaggtcaacgcccacaatatggaaagaatagaagcaaattgccagggtaaaactacgatacggttcgtgacaatgggcgactcacaacgatggtatgacgaaacgaaagattttgtaaaagcaatcaatcaacgaaatgatattgacttcgttatccacggaggggatatgagtgacttcggactgactaaggaatttctttggcaaagggatatcatgaacggacttcatgtgccttatgtggctctgatcggaaatcatgactgtctgggaacgggagcggaaacctacaaggctgtattcggccccacaaacttctctttcatcgcaggagatgtgaagtttgtctgcctgaataccaacgctttggagtatgattactccgaacctgtaccggactttacctttatggaaaatgagataacgaacaggcgggatgagtttgaaaaaacggtcatttgtatgcacgcgcgtccctatacggatgtgttcaatgataatgtggcaaaagtattccaacactatgtcaaacagtatgcaggaatacagttctgcacggccgcccatacccatcaccatcaggacgatgtgatttttgatgatggaatacattatgttaccagtgattgtatggattaccgtacttatctggtatttacaataactccggaaaaatacgaatatgagctggttaaatactaattatatcttacgcgcgggagtactgtccgtgcttctcctgcttcccggtctgatgtctgctacctgcaagagggatacaatcatcaacaactacaaggatgattcgctccgttttatcatcaaggatgattcaattatcacctttcgtaacggggagtcttcattcaccattatcaaagcggactccgtgttgcctgccacaccgaagcacaccaaacatacccgctacgataatcgggttcaccgtttccgcagaaactgggaacggattatcccgactcattccaaaatacaatatgccggaaatatgggattgctctctttcggtacaggatgggattatggaaaacgtaatcagtgggaaacggatgtattgctcggattcattccgaaatattcttcgaagaaagcaaaagtgaccatgacgctcaagcagaactatatgccctggagcattaatattggaaaaggattctcgacagagcctcttgcctgtggtctttatgtgaataccgtatttggaaatcagttctgggtgaacgaaccggaacgttatccgaaagggtattatggtttctcaagcaaagtgcgtttccatgtctttatgggacaacgcctgacctatgacattgacccgcaacgtagatttatggccaagtctgtaacctttttctatgaaataagtacgtgtgacctttatgtgattagtgcggtaaacaatagttatctccgtccacgtgactaccttagtttatcattcggattgaagttccagtggttatgattggagacacaagggggataaaatcaattttgaattacgattcttgaattatcacatccttttttcgtaagtttgcgctttacaaacttgaacgaaaatgagtaaatctggaacaatcatcattgtagacgacaataaaggggtgctgactgccatacaaatccttttaaaaagttatttttcaaaggtcgttgcactctcctcgcctgtcaccctgacgagcgtcctgcgggaggaaatgccggaagtggtattgctggacatgaatttcacatcgggcatcaataccggcaatgagggattattctggttacatgaaataaaaaaagtacgtccggatcttccggtcgtactttttacggcttatgccgatattgaactggctatccggggtattaaagaaggagcaacggactttatcgtcaaaccctgggacaaccagaaactggtggaaacgctgcaaactgcagcaacctctacgcacaacgataggaaaacggcaagtaaagaaaagcctgttcactcgcctatgtactggggagaaagcaaggttatgcaacaactacgggctttgattaaaaaggttgccgtcaccgatgccaacctcttgataacgggtgaaaacggaacgggaaaagagatgctggcacgggaaatccatgcgctttccaaccgcaaatataaagaaatgattgctgtggatatgggaaccatcaccgaatctttattcgagagtgagcttttcggacatataaaagggtcgttcactgatgcacacgccgaccggacaggtaagttcgaggctgccgaaaagagtacgctgtttctcgacgaaataggaaacttgccctaccatctgcaagcaaagctactaaccgccatccaacggcgaagcattgtgaaagtgggaagtaacacgccaattcctattgatatccgactgatatgtgccacgaaccggaacctgcaggagatggtagcgaaaggcgaattccgggaagacttgctctaccgcatcaataccattcatgtggaaattcctcccctgcgcgaacggaaagaggatattatcccattggccgaacgatttatggttcacttctgcaagcaatatgacaagtcgttgatgaagttcactcccgaagcaaaggataaattgactgcgcatccctggtatggtaatatccgcgaattggagcacgtcatcgaaaaggcggttatcatcaatgacagtccgctgattcctgctgaattattccaattatccgtaccacggatagccattcaggaacagagtatctccaccctggaagaaatggaagtgcagatgatacggaaagcgctcgatgcctgtgcgggaaatctatcggcagtggccgctcaactgggaataacccggcagacgctctataacaagatgaaaaaattcggattatgagctcactgatccaacaactggggattcggtactggttcagagttttgctgactgtacttttctgtatatcgaccgtctggttcggtattcatcaatcatacggttggctgggcgtcagtctttgtctgctggtacttagcatcatctggcaaatccgcctgtaccagcttcacaccaagcaggtgcttttcatgattaacgcgcttgaaaataatgataacacttttcattttcccgaagaaaacggtactcccgaaagccaaaagatcaaccgggcactcaaccgggtgggacatatcttatataatgtaaaagcggaaaccgcacaacaagagaaatattacgagctgattctggattttgtcagtacaggattgctggtactcaatgacaatggggctgtttatcagaagaacaaggaggcactccgtcttttggggctgaatatattcacgcatatccatcagttgagtaaagtagacactacgctcatggagaaaatagagaactgccgtcccggagacaaactgcaagtgatatttcacaacgaacggggaaccgttaatctatccatacgtgtatcggaaatcaatgtgcgcaaagagcatctgcgtattctggctctgaacgacatcaataccgaactcgatgaaaaggaaatagattcatggattcgcctgacacgggttctgacgcatgaaatcatgaattcggtcactcctatcacttctctttgtaacactcttctttccatgtccgaggataaagacgaagagatcagtcacgggttgcagaccatcagcaccacaggaaaagggttgctctcttttgtagaatcttaccggcagtttacacgcatacctgcaccggaaccgtcattgttctacgtgaaagcgttcatagaaaggatgattgaacttgcccgccatcagaatccgtgtgacaccatttgtttccacacggagatttctcctgcggacttaattctgtatgcggatgaaaacctcatcgcccaggtggttatcaatcttctgaagaatgccatccaggcaatcggcagccagccggatggtagaatcgagcttcgggcttattgcaatgatatggaagaaatatggatcgagatcaaaaacaacggtcctgaaatcccgtcggaaatagcagagcatatctttattcctttcttcaccaccaaagaaaatggtagcggaatcggacttagtatttcacgacagatcatgcgtctttcgggcgggagtctcactctgctgcgggagaaagaaacaacgtttattttaaaattcaaataactattgatatatgatacctgtactcgtcaacaatcccttatttcgagggatcactccggaaagactttttgccgatctggaagagatcagtttccatacacgttcttataagaaaggagaaatcctggctcaacagggagctgtgtgtaatcgcctcgtcatcctgaccaaaggaagcgtgcgtggagagatgattgattattcggggcgtcttatcaaagtggaggacatcgctgctccaagagcgattgcccctctgtttctgttcggtgaggagaaccgctatccggtggaagtgactgccaacgaaccgacagaggttatcgaacttcctaaatcaagtgtattgagtttattccgtaagaacgagcagtttttggaaaactatatgaatctttctgccaattatgcacggactttatcggataagcttttctttatgtcgtttaaaacgattcgtcagaaacttgcttcgtacttgctccgattatacaaacagcaacaacagacgcatatcaccctcgaccgttcacaacaggaattgagtgattatttcggagtatcccgtccttccctcgcccgtgaactggcgcacatgcaggaagatggattattgatagccgatcgcaagcatatcactattttacagaaagaacaactggtacggcttattcaataataggagcagtttaaagatttatgaatcgaataatgagtgttttagataaaaaatattcattgttgtaacattggttacagaatcacctgaaacttttcctctacttttgcgttcaataaataaaatattggactaattaaaaacgtaaaagttatgagtatgttctgttatcaatgtcaagaaaccgcaatgggtaccggctgtaccttgaaaggtgtgtgcggtaaaacgtctgaagtggctaacctgcaagatttactactcttcgtagtacgtggaattgctgtctacaacgaacatctgcgtaaagatggacatccttccgaacaagcagacaaatttatctatgatgctttgttcattaccatcaccaacgccaattttgataaagtggctatcactgaaaaaatcaaagaaggactgaaactgaaaaatgaacttgccaacaaggtaaagatcgaaaatgctcccgacgaatgtctttggaatggaagcgaagatgagtttgaagagaaatcaaaaactgtcggtgtgcttcgcactcccaacgaggatatccgctcactgaaagaacttgtacactatggcctgaaaggaatggctgcctacgtagagcatgcgcataacctgggctacgagtcaccggaaatatttgctttcatgcaacatgccttgtctgaactgacccgcaatgatattacagtggaagaactggttcagctgactttggaaacaggaaagtatggagtatcggcaatggcacagctggataaagcgaataccagcagctacggaaatccggaaatctcacaagtgagtctcggtgtacgcaataatccgggtatattaatcagcggacatgacttgaaagacctggaagagttattggaacaaacagagggtacaggagtagatgtatatactcacagcgaaatgttgcctgcacattattatcctcaactaaagaagtacaagcatctggcaggaaactacggaaacgcctggtggaagcagaaagaggaatttgaaagtttcaacggtcctatcttgttcacaagtaactgtatcgttccgccacgtgcaaatgccagctacaaggatcgtatttacatcacaggagcctgcggcttggacggggcacattacatccccgaacgtaaagacggaaaaccgaaagatttttctgcactgattgctcatgctaaacaatgtcagccaccggtagccattgaaaacggaacgattatcggaggattcgctcatgcacaggtgacagccctggcagataaagtggtggacgccgtgaaaagcggagctatccgtaaattctttgtaatggcaggatgcgacggacgtatgaagagccgtgaatactatacggaatttgctcaaaaattacctggtgacaccgtgattcttactgccggttgtgccaagtacagatataataaactggctttaggtgatatcaacggcattccgagagtgttggatgcaggacaatgtaacgacagttactcattggccgtcatcgctttaaaactgaaagaaatcttcggattggatgatgtgaatcagttgcctatcgtatacaacatcgcttggtacgaacaaaaggcggtcattgttttattggcattactggctttgggagtgaaacacattcatttgggtcctacacttcccgctttcctttcaccgaatgtcaggaacgtattgatcgaacaattcgggatcggaggtatcagtacagtggatgaagatattgtgaagtttctatcataaatgataaggaaacagaagggtattttacaagcagattctcttctacaaaatagtgacggtatttgataaggatagtgacggtatacaacaaccataccgtcactatttccatcatatacgtcactatctttttttctatattaggaggactcctgcttaatcaggagtcctgcatttactcccgcatagtggatgtttttttgaatagaatttcaatcctctctgggtaatattaaattgagaactactcccaccaaagctgccagtccaatgccggacaatgaaaaatcgccccaattaaaagcagcgccaccaatgccgacagtcagtgtcaaagatacaatgattatatttctggtacggctcaaatcaatgcaattattcacaagattaccaatacccgcacaagcaatcgttccgaaaagcaataacatgatgccgcccagtaccgcacttggaatggatcttaataatgcactgattttaccgataacggagaataagatagcggaaatggcagctattcggatcacttgcggattagtaatctttgtcagtgacatggctcctgtcacttccgaataggtagtcacaggaggcccacccagcaatccggcacagaaacaggccagaccatcacccaataaggtgcggtgcaaccccggatctttcacgaaatcttttccggtgaccgtattaacgacataaatatcaccaatatgttctatcaccggagcaatggctaccggaatcataaacaacacaggttcccatgagaatttaggaaagacaaactgcggcaatccaatccaggcagcatccctgacaccggacaaatccaaatcgtagaaaagccatgcagccagataccctactacaattccacagaagataggaatcagtttcaaaagccctttggctttcattgaaacaacgactgcggtaaccaacgaaagcagtgccagtacccagttctcttttgccatattcactcctgttcccgccagtgacaaacctatcagaatgatgacaggtcctatgacaacaggaggaaacagccgctcaatcaccctcactccctgccatttgacaagcgcactcatcacaaagtaaactaatgctactccaaccatgccggataaggtgccgggcaacccataaagttctgtcgctttaatgataggcgcaataaatgcgaaactactccccagaaagacaggaacctttccacgcgtaaccgcatgaaagataagcgtaccaatacctgctgtaaacagagctgtagaagggtcaagccctaccaataacggtacgagtaccgtagcaccgaaagctacaaacaagaattgtacccccaccacccctttcctcaaaggtgtaagattatttgaatccataagtataatgtagattattctttgcaaaattagtctttttagacaatttaactcccttttttcacaaaaatacatccaaaaagagtttttatttgttgttaataatgtgtaacttcgcacggtgagaattaatacgacaattttataactttataatatattgcctatgatatttacagcagaaaacaccctacttatcggttctatcttacttttcgtcagcatcgttgttggaaaaaccggataccgctttggagtacctaccttattattgttcctcgtagtaggaatgttgtttggaagtgacggcctcggcctgcagttccacgacgcgaaagacgcccaatttatcggtatggtggcccttagtattatccttttctcgggaggtatggatacgaaattcagagaaatcaaacctattctaggtcccggtatcgtgctttccactgtcggagtactacttacagctcttttcaccggactctttatctggtggatatcaggtatgagctggtcaaatatttatttacctatcactacttccctgcttttggcctccaccatgtcatctacggattcggcttcggtgttcgccattctccgttcacagaagatgaacttgaaacacaaccttcgtcccatgctggaactggagagcggaagtaatgacccgatggcctatatgcttaccattgtcctgatacagtttattcaatcgtcaggtatgggagtcggagctatcgtaggctctttcgtcatccagtttatcgtcggcgcggctgccggatatgtacttggaaagctagctatccggatgttaaataagctcaatattgataatcaagccttgtatcccatcttattactggcatttgtgtttttcactttctccatcaccgacttactgaaaggtaacggataccttgccgtatatatcgccggtatcatggtgggaaacaataaaatcatgcaccgtaaggatatctacacctttatggacggactgacctggttgtcgcaaatcatcatgttcctttgcctgggattgcttgtcaacccgcacgaaatgctcgaagtagctgccgtggcattgttgattggtgttttcatgattattatcgggcgcccgttaagcgtgttcctttgtctgcttccattccggaaaatcacgatgaaatcacgtattttcgtatcttgggtaggattacgcggtgcagttcctatcatctttgctacctatccggtagtggcgggcgtagaaggttcgaacctcattttcaacattgtattctttattaccattgtctcattggtcgtacagggaacaaccatttctttcgtcgcccggattttgaatctttccaaaccgctggaaaaaaccggtaacgacttcggagtggaacttccggaagaaatagactctgatcttagtgacatgactatcaccaaaagtatgctggaagaagcagacacattgaaagatatgaatcttccgaaaggcacgctggtaatgatcgtgaagcgcggagatgagttcctgattcccaacggaacactgaaactgcacgaaggagataaactattacttatttccgaaaaatccaaagaagaagatactgattcagaataacatctgaaaagagttattcagtacactataactgattcgtctccacgcatggaacctcttgccttggcaagacattcgtttcatcttcatgcgtggagacgaaatgttttatataggccaatgaactagttctaaggaagaaacacgaatgacctttatccggctgataaaattgttcgctccccctccgttaattaaccgtaaaacttgaatttaaaattcggtttacatctacgaagtattaattttgcgcagttttaaactaaatgtgcaaaaatcgaatggaacaagaacatcagttcattgattatattgagcaaagcatcatcaaaaactgggacaaagatgccttaactgactataaaggaattaccctccaatataaggatgtagcgcgtaaaatcgctaaatttcacatcgtcttggagagtgccggcatccagccgggagataaaatagccgtttgcggacgtaacagtgctcactgggcagttactttcctggcgactatcacttacggagctgttattgttcccattttgcatgaattcaaggcagataatattcataatatcgtcaaccattccgaagccaaattacttttcgtcggcgaccaggcatgggagaacctgaatgaagatgccatgcctttgttagagggcatcgcttcgctggctgatttctcggcattagtgtcccggaacgaaaaactcacttacgcttttgaacaccggaacgctatttacggtcaacagtatcccaagaactttcgaccggaacatatttgttaccggaaagatcgtccggaagaactggctatcatcaactatacttccggtaccacgggttactctaaaggagtgatgctcccctatcgcagtctttggtcaaacgtggcttattgcttcgaaatgcttcccgttaaaccgggagatcatatcgtttccatgttgcctatgggacacgtgttcggtatggtatatgatttcctttacggattctctgcaggtgcacacatctatttcctgacgcgtatgccgtctccaaaaatcatttcccaatctttctccgaaatcaaacccaaagtgatttcttgtgtaccgttgattgtggaaaagattatcaagaaagatattcttcctaaagtagacagcaaaatcggcaagttattgctgaaagtgcctattgtgaacgataaaatcaaatcgctggcacgacaggctgccatggaaatcttcggtggaaactttgacgagattattatcggaggtgctcctttcaatgcggaagtagaggctttccttaaaaagatagggttcccctacaccatcgcttacggtatgacggaatgtggtccgattatttgttccagccgttgggaaacactgaaacttgcttcctgcggaaaggcaaccagccgaatggaagtccgtattgactcaccggacccgaaaacacatgccggagaaatcgtatgcagaggaatgaatatgatgctgggatattataaaaatccggaagctacggcgcaaattattgatgctaacggttggctgcataccggtgacctcggtacgttggatgaagagggttatgtgacagtccgcggacgtagtaagaacctgcttctcacctctagcggacagaatatctatcccgaagaaattgaaagcaagctgaacaacatgccgtatgtttcggagtcactgatcgtcttacagcacgaaaaactggtagccctgatctacccggatttcgacgatgctttcgctcatggattgcagcagacggatattcagaaagtaatggagcaaaaccgtatcgaattgaatcaacagcttcctaactattctcaaataagcaagattaaaatccattttgaagaatttgaaaagactgcgaaaaagtcaatcaagcgctttatgtatcaggaagcaaagggataattatcccggataacacaatgagtatccttgcaataattctcatagtattaggcacggattatataaactgataatgagaacatgcttaataataaaaacggtgaacagcctcaacactgtccaccgttttttctaacctctaactaactttatttatactacctatttttctatcttcctacctaaaaacgaatcctatttccattattaacagtctaactttataatcaatcgatctttttaaagtgccataaatgaaatagcctgtccgcctccggcagccattcgtatgttcaacgtattttcagaagtaaccgtttgttccgttatccggtaatccgtaggatttgatttccaatccgcattctctccatccgcatagatgacagctttatactgtttgcccggttccaggaaatccagttttatttccagtgtacggggtttctcgttcgttgccgctcccaagaaatagttgccttttgctttacgcacgatggctacaaattcccccggttctcctgccaatgctttcgattcgtcacaatccggatcgaaatcgcggaagaactggaaagccggatggccttcataattttcaatcatatcagatgccatctgcaagggagaatacaaaatcacccagttagcaagctgtttcgccaatgttgtattcacacggctgtttcctttatcctgatcgttccatttctggcgacggggagaatctttggtgttcagaaacaaaatatcaaacgtacccggtgtataatccagcggaccggacagcatacgggtgaacggcaacatgacatgatgagacggaggatttccttcgctccatgcattccattccatccctctcactccttcacgtgtcatcatattaggccatgtacgacggataccggtatctttaataggttcgtgcgcatccagcgtcattttgtgacgggcagctgtttccaccactttctgatagtggttgaccccatattggctgtgatgaagataaccattcgggaaagctcccgcatatcctgtcttaaggacatggataccgtggtctgtgtaccattgcatagcatgatccatctggcgctcatagttgggaatattccctccggtctcgtgatggccgataacttcaactcctttttcctttgcataacgaaccacttcatcaatgtcaaagtcagcatacggtttcgtaaagtcaaagttttgcataccaccccagctttcccagccttcattccaaccttcaaacaaaacgccttcaatctgattggtagcggcaaaatcaatgtatttcttggcattgacagtagtggctccatgacgttcatccatcttccaggtttctacgccgagatgcatcccccaccatacacctacatatttcatcggacgaatccaatcggtcgtttctattttacttggttcattcagatttaaaatcatagccgaattaatcagactaacggcatccggaacaatctgaatagtacgccaggaagtagtgaaatgattacctttacgcactttcacaccatcaggccatggagcaagttcagctttcaacgtatagtttcctgcctgcttcaaagtcatttccgagaaatcgtacaatgccgcttcatgaatacttccgtagacgccatcggcagttttaaaggtgaaaggagtattggctgtctccacctcggaaatgggacgttgcgcataaagcaattcataagtttcggcactggcaggaatagaccatgatgtaccgtcttggcgaaaacggaaagttgtcagttcatccgtaatcaatagggaatccgctgcgggcacattatattcataacggaaccctaccccatcatcaaacacacggaaacggagagttaactccacctgatctttattgaccaaatttaccgccatctcattataatgattcctattggttttattttcaccccatggttgcgtccatgtttcatctttactgtcgaaagtcgtgttttttatctgaaatcctccgcccaggttgataccgtttttctccgtaaatcccaatgtcgaattttcaatcaacaatgagtcatctactaaaatgttatacaacggtttaccgttgtcatctactgttaaagccattttgatatgaccgtccggcgatttcacttccgttttcggactgctacacccgtaacatcccagcacacacagaaaagctccaatgacataatttattttcatagcatatctattgtttgtatatagtacaactcaaaaagcagggcagacgcattatattttttactatattctcgtttgtaatttccttactatattgttggttattaacatattatcatttgctaatgtcgattattttccttatctttataagatatattaaaacataaactaacatgaaaattggcataattgacctttgtaaacaaatagaagatcctaggatgaaccgcaaaaaagtacataaaatggaaactattatctatatatccattgctgctgtaatctgtggcgctcaatcctggaatgagattgaggaatttggcaatgcgaaaattgcttttttcaaaagtcgcatacctggtctggagttcatccctagtcatgatacttttaatagattcttcagtataataaagcccgagtattttgagttgatcttccgtaattgggtaaaacaagtctgtcaggaggtgaaaggcgttgttgctatagatggcaagctcatgcgtggtccaagccaatgtgacggagaacatactacgggaaaagaaggattcaaattatggatggtttctgcatggtctgccgctaatggaatttctttaggtcaggtaaaagtagatgataaaagcaatgagattacagctattccattgttaattaactctttggaactaagtggttgtattgttacaattgacgcgatgggatgccagaaagatataacccagaccattattgagcataatgcaaattatattatagctataaaggagaataagaaaaaaaattatcaactagctaaacaaatcattgacgattatcaggatagagatgaaataaccaatagagtcaccaggcatgtgtcggaaaacaccggacatggaaggattgagacaagaacatgtactgtagtcagttatggatctattatggagaaaatgtttaagaagaaacttgtggggttgaagtctattgtagggataaagtcggagagaacaatagtagcaacaggagaatatactcaagaggtcagatactatgtaacttcacttgataataccaaaccggaggagattgcatctgccatcaggcagcattggtctattgagaataatcttcattggcaactggatgttacctttcgagaagactacagtaaaaaggtgaaaaatgcagccagaaacttttcggtggcaacaaaaatggcacttaccatactaaagaatgagaaaacaacaaaaggaagcatgaatctgaaaagactaaaagcgggatgggatgaaaaatatttgtcacaacttttacaggaaaataatttttaatgcgtctgccctgactcaaaaaggagaaacacttaaatgtagggcggatttctttctccggatgccaggaaaaaagtatctttgcacataaacaatctgaattatggcaaagatactattggttgaagatgaaattaatatcgcctctttcatcgaacggggattaaaagaattcgggcattcggtaaccgtctgccatgacggggatacgggttggaaaatccttcaggacgaacctttcgaccttttaatactggacattatcatgcctaaaataaatggtttggagctttgccgcctttatcgccaaatgttcgggtatcaaatcccggtaatcatgctgacagctttaggaacaaccgaagacatcgtcaaaggactggatgcgggagcagatgattatctcgtcaaaccttttagtttccaggaactggaagcacgcatcaaagccctgttgagacgcaacaaagaagtcccttccaatctattgacttgcgataacctggtattggactgcaatacccgaaaagccaaaaggggtgacatagacatcgaccttactgttaaagaataccgcctgctcgaatatttcatgactcatcaaggggttgccctctcacgtatcactctgctcaaagatgtatgggacaagaattttgataccaataccaatatcgtagatgtttacgtaaactatctccgggtaaagattgatcgtgactttgataaaaagctgatccatacagtcgtaggattaggatatatcatgaatacttaaactcaccaacactaatcccggctatgaaaataggttccaaaatagctcttttctatacgttaatcagtgtgttgactactgtcattatcattgctgtattttatattttcagtacgcagtacatcaataagctctatgcttcttacctgcgtgaaaaagcctacctgaccgcacagaagcattgggaaaaagatgaagtagacgaacagagctaccagattatccagcgcaaatatgacgaactcctgcctgaagcccatgagattcttttaaatatggacagtctttccgaagtacgtgatacactgaataaatacctcacgcaacaccagcaggctcttctgctggcaggacaggacagcatccctttctccttcaaatataaggatcaactgggagccgccctttattatccggataatgaaggcaactttatcgtactcgtcatgtcccggaatgcctacggaacagaaatcaaggaacacttattgttgctttccatatttctcatcttagccagttccgtcctgatcttttttatcggaaaaatatattccggccgtattctggttcccctgcaacacatactaaaggaattgaaaagaatacgtgccaacagtctgaaccgccgattaaagactactggcaataatgacgaactggaggacatgataaagacattaaatagtatgctcgaccgtttggacagtgcattcaaggcagaaaagtcctttgtcagtcatgcttcacatgagttgaacaatccgattactgccattcagggagaatgtgaaatcagtctgctgaaagaaagaagcacgggagaatacattgaatcccttcaacgaatttcttcagaaagcaaacggttatccagtctgatccggcatcttctttttctttcacgacaagaagaagaactcctgaaaaacaatattgaagagattattctggccgatatattaaaagagttgacagcttccgatgagagaatccatcttcatttggaagagacagacccgcagatgactgtaaaagccaatccatatctgttgaagatagcattaaaaaatataatagataacgcctgcaaatattctgataaagaagtaaatgtgactctctaccgggagcaacaacaagtcattcttgatatagaagaccggggaatcggtattccgcaagaagaaatagaacatatattccaatctttctatcggggcagtaatacccgggactatgccggacaaggcatcggacttagcctgaccctgaaaatcatttctgcttatcatgcaaagctggatatatcttcagaaatagaaaaaggaacaaaagtacgggtgattttttaatcacccttcttttatccctttctctctctacctactgaaaactacaaatttaatctatgaacgttttttccacagaatagaaatgaactaaatacgtctttgcaataactttccatttttatcatataacattcgttcatataccacttccacaataagaggaaagacaaacaaagcaaagaaagtcgctcctatcaatccaccgataatgacaatcgccaacggacgctgtgattccgaaccaattccatgactcatggcagcgggcatcaaaccgatagctgccattgccgctgtcataatcacagggcggatacgcgagcgcactccttccttagtggctttctccaaaggcgagccgagttttagattcgcctttatatcggaaatcataatcaccccgttctgaatacaaataccaaacaaggcaataaaaccgataccggcagaaatggagaagttgaactgcgttatcagaagagccacaataccacccacggcagcgaacggtacattcagcaataccagtcccgcatcccgcgcattagagaatagaataaacaagatgataaaaatgatagcaatactgatagggacaacctgtgccagacgttttgtggcacgttgctggttctcaaaatcgcccgtccatttcagcgaatagcctgccggcagatgtacggaagcattcacctttttctgcgcctcggcaactgccgtacccatatcacgacctctcaccgagaatttcactgcacagaaacgagcgtgattatcacggaatatcaataacggtcccgtaatcgtcgttatatctgccaattctttgataggtaccatcgttccatccatcgccggaaccaatatcttacctatctcctcttcattctgacggaattgttcgctgtatcttaccatgatattaaacttccgctcatcctcatacaacagtgaagccgattttccgccaatagccatttcgataattgattgcacatcttccttagcaactccataacgcgccaactggcgttcattcaactctatacgaagctccggctgaccgatgttccgaatcacacccaagtcttcaattccctgaaccgtactaaggatcttatctatctgaaccgcatatttctccgactcatacaagtctttaccaaacactttcaccgcaatagatcctttcacaccggaagctgcttcctccacattatcagtaatcggttgtgagaaattgaagtcaatgccgggataaatggataaatcctcctgcatcttatcaatcagttccagttttgtcaacttactctcccattccttttcgggataaatatcaacgtggaactcgatattatagaatccggtagcatctgtaccgtcattcggtcgtccggtttgcgacagcacttgccgcacttccggaaacgttaatagtttctttctcattttattggcaagagtcaccgattcatcaagcgaaatgctttgtggcaaggtagcacgaatatagatagatccctcattcaactgcggaaggaactccgtacccaggaaagaaaaaagccataatccgacacccgctattacggttgccattccgatggtcagttttctgtgcgcatagaataaatcaaaaagagccgaacacttcgcattgataaaatggacaaaacggttatttttctcacgaacattctttttcagtaacatggaagacatcaccggaaccaatgtcaatgtaaagatcaaagctcccaacaatgcaaagcccagcgtgtatgccaaaggagagaacatctttccttctaccttctggaaagagaagataggaatcaatgcagtgatgataatcaatttggagaagaaaaccgctttcgccttgtcttttgccgtgttacggatcaagcccattttagacatcacattaaaagcaggcatccccacttccctcgctttcttgtccaaagccacaaacactccttccaccatcaccacggccccatcaataataataccgaagtctatggctcccatagaaagcagattggcggacattcccatcacccgtaaacagataaatgcgaacaaaagggctaatgggataacgacagcaacaatcacggtagtccgccaatctgccataaagatcaatacaataaacgtaaccaataatattccttcaatcagattatgcgtcacagtctttaccgccagattcaccaagtcctcccggtcatagaatgccactatcttcacatctttcggaagtacattctgattcaagtcctctattttatctttcaggttggcaatcacctcacccggattctctcctttccgcatgactacaatcccctgtacaacatcattttcatccattcggcccacttgtcccaaacgaggcaaacaggattcgtgtacatcggcaagattcttcaccagaatcggagtgccattgatgtttttcactacgatatttctcaattcatccagatcgttaatcaaaccgattccacgaaccacataagcttgcgaacttttagtgataacatctcctcctacattgatattacttttagctatcgcatcatacagttccaaagaggtaatgccataattaatcaactggtgaggattcacacttacctcaaacgtcttcacctccccgccgaagctcacaatatccgctacgccggataccgaacggagattacgttcgatcacccaatcctgaatcgttttcagttcccgcacactgcgcttgtcactacgaagcgtataacggaatatttctcccgtcggtccatacagaggttgtacttccggagttaccccgtccggaaggtcggcatcattcaataaattatatacctgttgacgtgctgtgaaatcatcgacacgatcttcaaacattacattgatgacagaaagcccgaaaagagtggtggaacgaatatccgttttcttctgaacgggattcatcgcaatctcaacaggaatggtgataaacttctctacctcttcggcactacgtcccggccattgcgtgataatcgtcactttcgtattcgtcacatccgggaaagcatctatcggagtatgtttaaaggaaacagctccggctataacggcaatcgctgtacagaagaaaataaagaatttattcttcagcgagaaagccactatattatctatgaatttgtgcatactattttctgtttttaatctgcattcaacgcattatataccaacaatacattattattcagcactctgtctccctcggaaagtccggaacggatatagcactccttgctcaactgcttgtacacatccacctctttcacctgcaaacgctgatccggctccaccacgaccacataattctttcctccttcaaataccagtgcatgagcatcgatacgaggcatagaagttccatccgctttacatttcacacttacattcgtaaacatccccggtttcaacaaatattcttcattcttcaatttgatgcggacattcatcgttttactttcactattcaacaaatgatacaccttatcaatcgtaccgacaaacatcttatccggataagccaacgtagaaatgcgtacggaggcatcttcggaaaccttactgatatcgctttcatacacatccgccatcacccatacgtctgacaaccccgaaatcgtgaacagctcttcactctgatccggacgcaactgcatatccctgctgatttgtttctccacaataaaccccgaaacaggagatttcagctgataataagcatttccggagaaattataaatagagaaaacatcctttattcttctttcttcggcttcggcacttgtcaactcctgcttcgcctgaagtacatctttatccgaagccatgccggaagcatacatatcctgcgtagcatccatatttctgcgtgccagcaataattgttgttccgcctctttcaattgcttttcataatctgccacttctccactgcggatgactgccaatacatctcccttacgaacaaagtctcctatttcagccttcaattctgttaccgtacctccaaacatcggatatacatgtgccacctgattctcattaaaagtgacccgcccgttcaatgtcagttcgtcaatcacctcttgaacgtgaaccgtatcgacagatacaattctcaacaagctatctgtcaggcataaggcagccggttcaacattcgtttgttctcctttaccggagcatgctcccaatacggtagtaagcaatatgcaaggaaggaatttattccagttcatagtctttgataatttatgaatattagtagttcaatatagtttgtccgatagttgtattcaggttttccatcgccaggaaaacatctttctttatttcatgcaactgaatacaagtttctttatagctgtcatagtaatcgataaactccaataaactgatatttcgtttcttaaagttttcattcactcccgcaatcaatttttcaaagttacgttccagttccatattggtagattgataaagctgaactgctttatccagtgaagcataagcggtataaagctccatatccgcacggttagccgcattttcctgttccgctcctgcctgctggatactaaaacgggcagctttcacatttccctggttgcggttgaaaataggtactgacaagctcactcctattgcaaaatagttattgataaagtttccggcacggtcataactaccattcaccgaaaattccggaaatgccattgatttctgcaatttcagatttgcacgggaagcactgaccgtactccgggcaatcttgagatccggccgttcattcaccatcgctttcaagtcggcgaacgatagttgagacaaatccaattgcttcaacacctcttcatccagtgataactcaaccatcgtgtctcccggaagatttaacaagacattaagttctcctctaagggtcaacaactcgttttcccgttcgttcttctcttttttcaaagagaacaacatagattccagacgggacatttccatcaatgaaatatttcctttctcctgttgcagtttcattccggcaagtaactcttgcagagaattcacttccttctcataaatggatatggatttcgagagaaaatagacttgtacaaacttctcattcagctcctgacgaagtgtcctcatcacctcttcaaactgatattctgctatttccttgttgattttctccagtttcacctgcttattccgttgtccggcaagacgaattacctgttcaattcccacaaccatttcgccctccttaccaaaatcaaaatactttccgttcaggcggttataaacattctgttctaacgagattaccggattctcaaataatttggcttgcagcacttgtgcctgtgccatatcaatgttataccgttcggctatcagtgataagttacgttccagaaaacgttgttccgcctctttcagcgttaatgttcctgtggtagcctgttgcgcgcatattcctcctgtcagcagaagaaaaaaagaaattagaaatactctgttcattactatatttatctttattaccttattgtagttgtcgcggcaaaattacaattctgtagccggagagacgggaaaaagtcattataagcctctcatatcagattagaatttgattagaaaacagccatagaaggaagaattgtaaacacaacaggaaaaatggctatccttcttttatcccaactcccctatctttgcagtagagaaaatgaaatgaaccattaaaaatagaatatatgaaaataatagatttaaccaaagatagttttgtagagaaggtagctgattatcaatcttatcctgataactggaacttcaaagggaataaaccttgcctggtcgattttcatgccccgtggtgcgtctattgcaaagcgttatcgcctatattagaccaactagctaaagaatacgaagggaaattagatatttataaagtagatgtcgatcaggaaccggaattggaaagtgcatttaaaatccgcaccattcccaacctgttactttgcccgctgaacggcaaaccgacaatgaagttaggtacaatgaataaaaaccaattgaaagaactgatagaaagcagtttgctttcagaatagaaatacattaaaagtccgggatacttctgatgatgataaactgccggacttttgatatcatacagaacattggcttttataatagggagtgtgtcaaaacgcagattatcgcgaattatcgcagaaataattttataagtcattgattaatatatcaatataaatgaaataatctgcgataatttgtgttaatctgcgttttattattcattatgaccctcctctttggggatcatttcaactattctttatgcaacagaatatcagttcccggaacaatctttcccatcgaccatacacatcgtacattcagttccttatcaagaatcacaatatcagcatcctttccctttgccaacgcccctttccggtcactcactcctattaaacgggcaggagtttcagaagccatacgcacggcatcttccaaaggtatattcgctttcttcaccatggtgcgaaccaatacatccatcgtagccaggctaccggccaatgcagaatgatctgccatcttacatacgccgtcctctatgatatagcgaggatcaatcggttcattcccttcataagcagcataagccaaagcatcggtaacgaggcacgtattctctacacctttcaacttataaaccaactttagaatcgtggcaggcaagtgaataccatctgcaatcacttccactgtcatcccatccgtcaaatatacgctctccaccgtaccctcatatttatactcacgacgtttatggaaacccggcatcgcattataaaaatgggcagcatgagagaagcccactgcatacgcagccttgatttcatcatattcggcttccgtatgtgttacggcagtcataattcctttcgaacgggtatactttgcaaaatcatgtgcaccgggtagttcgggactaatatcccaacgtctgatgcaagacgtacgcgccaataaaggaatatattcattttcatccggagttttcagaaaaccgtcatactgtgttcccgccatcttcggattcaagtaaggaccttcgatatgcaggccaagaacaggagaatccttctctttcatcaggttttcacagacatcaactgcctggtagattctttcgaacgaggtagatgataatgtaggaaatatcccggtagcaccatgtttcagatgtgcagtagttgccgtgcggaatgcttcttccgttgcttccgtataatcatgtccgccacctccatgtgcatgcatacttacaaatccgggcacaatcgtcatccctctggcatcaataaccgttgcaccgataaccgccaaatcactgttggtcacctctaatatttttccatcacaaatcaatacggaaccatctttcaaccagccttgcggggtcaatattcttccatttattatttgagtcaacatagttttcgttatttattagatttaaaacagtttattggtgccttctaccagttctcccatcgcccatacagctctcacattcaagtctctgtctaaagcaattatatcggcatccttgccacgctccagcgttcctttacggtcgagtactcccataatccgggcaggagtttcggaggccattctcacggcatcctccaaaggtatttccgccttctgcaccatggtacgaatcagtcgatccatcgttgcaatacttcccgccagtgctgaatggtctgccagcttacatactccgtcctcgataatcacacgcggatcaaaagccacctgactatcactggcggcacaagccaatgcatccgttatcagacaagtgcgttccactccttttatcttgtaaacaaggcgcaagattgttggaggcacatgaataccgtctgccaccacttccactgtcatatcatcaatcagataaatactttctaccgtaccttcatacttgtactctttccgtttatggaatcccggcattgcattataaaaatgagtggcatgcgtatatcccgcctcataggctgtctgtatatcctcaaattctgcctgggtatgtcctaccgaagccaacacccctttcgctgtgatatatttaccaaattgcatggctccgggaagttccggtgcggcatcccaacgtttgatacaatgagtttcttccagcaacggaatatattcttcgggatcgggatctttgatattttcgggaatctgtccacctgccatcgccatattgaaataatgtccttccagatgaagcccgagcacagggctattaggctccgccatcattttctctgtagtttccgcggctgcacggatcattggaatggtagaagaagaaagagtaggaaaaatactggtagtgccatgctgcatatgagctttgattgctgtccggaaagcctcttcggtgccttccataaagtctcttccaccgccaccgtgaacatggatttctacacctcccggaacaatatacattcctttggcatcaatcagtttggctccgataattgcaaggtcacaattggttacttccagaattttattgtcacgaataagaactgacccatccttcaaccagccttgcggggtgaggatgcgtgcattaataatctgtgttaacatatcacaaatagttaaattaattaaaggtctgtgtgaatcaatgacgctcttttttggggggagtacattgattttttcgtttgcaaaattacgcttttccgttcaatctatcgatacaatcgtccggtaaacttccaatattatacaaaaaaaggttgccaatcttatcgactgacaacctcatcttatatggagcggaaaacgagactcgaactcgcgaccctaaccttggcaaggttatgctctaccaactgagctatttccgcaaactaaatttcgtcattcagaaatctgaaagattggtgcccagaacaggactcgaacctgcatgcctctcgacacacgcacctgaaacgtgcgcgtctaccaattccgccacctgggcaaaacttagttccattatttcaaagaaacaagagcggaaaacgagactcgaactcgcgaccctaaccttggcaaggttatgctctaccaactgagctatttccgcatttcactttcataaactgtgaagaggaggagactcgaactcccacaacatttctgtcactaccacctcaaagtagcgcgtctaccaattccgccacctctccataattttaaagtttaacctttgtgcccagaacaggactcgaacctgcatgcctctcgacacacgcacctgaaacgtgcgcgtctaccaattccgccacctgggcaaagattattgttccaacatttcaaagaaacatgagcggaaaacgagactcgaactcgcgaccctaaccttggcaaggttatgctctaccaactgagctatttccgcattttttcgtttgcggttgcaaaggtagggattttccgtaaacatgcaaacattctgcctacttttttcacagaaatctgttcactttgcacctaccgcaaaacaatcattttgattatcaactcattcggtcacgataatcttcataagaaaattgcttgtatatttcagctttcccctcttttgtccaaatggcaatggcaggatgatgaattccgttaaacatatttgtcttgaccatcgtataatgaatcatatcttcgaacacgatacgctctccgatttgcaactcgtgatcgaagctccacagtcccatataatcaccgctcaaacaggaatttcctccgagacgataaatatattttccttcatttcccatctctgcaccacgcacggcaggttgatatggcatctccagacaatccggcatgtggcaagtgaaactaacattcaaaatagccgtcttgataccacgactttccacaatatccaccacttcggaagtcagcactcccgtctgccaggtaaaggccgaaccgggctccaggataatgcgcaaatgaggatagcgtgcttttaatccttgcaacagtcttatcaaatgttcggtatcataatccttacgagtcatcaggtgtccaccacccagattcaaccatttaatctgtggaaaccaatgggcaaatttagcttcaagatgttccaacgtacgttccaactcataagaagaagattcacagtggcaatgacaatgaaagccttcaatgccttgcggtaatacatcaggcagcaaatcggccgttatcccaaaacgtgtgccaggtgcacatggattataaagttcggtttccacttccgaatattcaggatttacgcgaataccacaagaaatgccacttccttctgcaaccaccatcggatagaagcgttcaaactgctgcattgagttgaatgtgatatgactgctgcaacgcatgatttccgggaaatcctgttctgtataagcaggagaataggtatgcgccttgctaccaaattcctccaacgccaggcgggcttcatataccgaactggccgttgaatgattgatatattcacggaatatagggaaagagcgccacatggcgaacgacttgaaagcaagaataatttccactcccgccctgtcggctacactttttatcaaactcaaattctttcttaaaagttcttcttccatgatgtagcaaggagaagggaactggttaaaatctatcatatataaaattattatctggactaatcgctttacgaacgtgggtacaaaaatacaaattcaaaagcaaagagggattgttttatttttaattaagatattggttttcgcgaactttttcttatttttacaccttatatattatagtaagtattatatcatcctaaatacctgattaaaaatgaataaagatttaagaaaagtagtgattctgctggcacatcctaacatcaaggaatcacaagcaaacaaagcattagttgatgctgtcagtgacatggaaggagtagcagttttcaatctttacgagctgtcgcaagaaatcgctttcaatgtagatgaatggagtaaaatcatttccgacgcctcggctgtcatctatcaatttcctttctattggatgtctgcgccgtcattactaaagaaatggcaagatgaagtctttacttttctatccaagactccggctgtcgccggcaaatcgttgacagtggtaacgaccacgggatccgaatacgaagcgtatcgcagtggcggcagaaaccgcttcacgatggacgagttattacgtccttatcaggtaagtgccattcattcgggaatgtcatggcaaacccctattgtagtctacggaatgggaacagcagatgcgggaaagaatattgctgaaggagctaatttatataaacaacgtgtggagatgcttatcggtagcagtaatgcagggaacaattggtaagatttataaagcgtagctttagataggataaagctacgctttacagttgctaaagtatagctttaggtttcaccaaacacttctttttcaatgtaaacactggcaggaaaataaacactccgattacagacattattaatcctccgatagtgcctgctgccaatggaaaccagaagccttctttttccatgcctgccataaaagggacaaatcccaagatggtagaagtcaccgtcagaaagataggaatcactttagtattccaggctttcacataagcccgaagcggtgaaagacgcgggaagcgtttacgaacggaattatattcattcaagatataaatgctcgcattaaccgtaataccacaaagcaaaacaaaagaagcaaatcctccctggtcaaaattcaatttgaaccaatagaatgtcagaaacacgccgatataagataccggaatcacaaaaattattgccaatggctgtttcaaagaattgaacagtatactcgtaataaaaaaaataatagcaatcacaatcaaaagcaaacgatattgcttgttgtcctttccaccccaagaccagttattatcctccgattttgcagtatatcccatcgggagaatctcgttaaactcttccagatcttttttcaatagtttatttccctgttccgaagaaccgatatactcatattgcaaacacagccgatactgttgattctccttagccacttcctgtggcatctgtcctttttccacagttgccaattcagaaagcttatattccctctctcctatttgaaaaggataaaactgcattgcccacacatccctatcttccgactgacacgaagaaagttttatcttttccgtcccctcttccgccattaccgaacctatttccatatttcgcccatatatcgggtgaatagcagaaaataaccttccggctccaatcccctcctctgccatccgctgttttttcagattaaagtagaattccatataatcatctttccaccaggagaaatcagatccgatcgtcacttcccgaatccggcggtgagacaataactttgcttttaatttttcaacccaatcatacagtgcatcgtaattatatccatacattttcacccggaaagaacccgcattctcacgtacatcattactgaacccctgatcttgtaaaccatatatactccaatttccacctcccagttgaagcgccttgctaatcatattcgctttcaacgtatagggaaaaccgcttttctggtgttctttcgaaaaatagatgtggatagatgacctgcgagcactttctacagatgtctggaattgcttaatctctttaaattcgctcaaataagtttccatcctcttcatcagtgtattcatctgctcaagtgtacttccattcggcaaattagcattggcgtgaagcactacctcttcattacgtgaaaagtaactcccttcatataccttttgcacaaataaccttaaagtacctcccaacaccttatctactatcggtttcaccttttctttataagtggtggtccccaacgtttgattataagttctcgcccatctatcatcacctttcatcttttccggcaatcgaaataccggtagtccgaataccaacaataacaaaatacataccgccaccctccaacggcaaagtatttgtatcagccacctgtaacaacgactgaaataaaccggaagccgacgtattcttgaacgtatccacacaaagcaacgcacctccccaattttccatttaactattgaaagagaaggtttctttcttcgtttcaatcctattttatcaattagagaaggaacaaaaaataaagcaaccagcagtgatactcccagatttataatcactaccgcagcaaaatcctgtaaattaagacgtatcttctcatccagaaaaaagatgataaccaaagctcccatcgtggtcaacgtggctgcaagaatggacataaacgctttccgatctctacgccgcaaataatgatcgctcattacaattgtattatctatcaccaaatttaatgaaaccgtaatacccgccaaagaatacaattgcatttccaatccgaacgcataataaagaatgacagctattgccatattaacagccagactgattacaatcaaaaaaagatatttaggactaaaggtgatcaacaatacaaacaggagcaaaatcgctacagtcattcccgtacgcaaataaattttccccagttcttcctgaataaattccgttgcgtcgtaactggtgtgaatctcatatcctgccggaagtaatagctggttatcatccataaatgcttttaccttttcactcaatgccaattgatttgctgtttcctctgcaacaatcgacagataaattgaattcagcccattaatccgataataattttgtggctgctcctccatacgggaaaccttcaccagctcattcagacctatgattttaccatctttcatttttacctttatccgctccgcattaaactctctgccctcctgctcgggaaccaatgccaaacgtatccactgtctgcccgaagcaccctgttctacatcataagtacccaaaaattctttttgataatgcaaccggacagcttgacgaatatcatccgtatttattccaagcgcacgcaattgttccgaatcatactccaatcgccattccatcggagtagctccgctaagattgattttataaattcccggaatctgtgcaagacgcgtttttatatgttcttccgcatactgctgaattaagaaaggagtagcgggtgcattgatcgtaaatgccataaaaggcccctgattactctgccccggcctgtgcatctgaatatacggatagctcaccccatccggtaattccggccacgtctgacgaataatagtagaagcttcaaagcgggcaaccgctgcatccacatgtttatccaaattcacactgacacttccccatccgtttcctgaagtggaagaaatccctcgaatacccttcacacgggcaagcattgcctctaacttactggtagccgtcatttccaccacacgtgctgaagtaccgggcatactgaatctcaccgtgaagccgggtaaggtccgcgacggattcaatttgacaggcagcaatggaatgagtgctaacccaaccaatgccacacagacaaaagccacaatcaatgtgaaagcggaagccttaggagattttactatttcagaatctatattttgcattttcgtcatttaaccaactttcctccattaaaatcaaacctgtccgaaagtgaaagtttcgcagcaaaatcaaataacgtaagtctccgtatcttataataattcagccagtagttctgcaaggcagagataaaattacgttgtgcctgctgctgcctgttgagtgaaagtgtcaggctgtttatatccgctttgccgatgataaaacgctgtttagtctcattataagcaagtatagacagatccaacgcttcttccgcactggctatcaattgctgctggatattaaaatcacttaccgtcataatcacttcctcctcgatgctaatctcatcctgacgtgccgagatcttcactacattcagattatttcttgccatattatacttacccttacgaacaccccagtccaataacggaatagaaacactgactgccaccaaatcctgctgcatcggtttatgatacacatctccaaaattatctgctacctgattaaaaccgatactggcattcacacttgcgttaaagcgagattctttcttcgtcttatccacattccgttccgcttcaagtacattctgtttcagttccaacaattgcgggttattattcctgccccacctcaaagcctcatctaccggaatatccaccatctccggacgggaaggaagttccagtttgatttgcgtattcttatccagattgagaaaagaagccagtgaaaacatagcccgtttcaggtcacttgctttattctgcaatgtattctgcgcattcacacgatccagtttcaatgtcaacaaatcagcctgtgagatagctgcaattcggtgacgctgttgcccaatacgatacaatgtatccgtagaagccaagttttctttagcaagattatattctgcctgcgccatagccagagagaagaaataattcgtagccgtttccgacaccttttccacattatagagaaattcctttttcacacgctcatacttcaacggttctatcctccgttcccatttgaaggagttatatcctaccagactttgcgaatatccgattcgtataggaacactcgtaagttgcgtagcactgttacttccgaagttacgcatataggcaagattcgattccagataaaaagtacctccggttaaatcaaaattctgttttacactcaatcctccataagcatagtaagactgttgcgtacggtatacatccaaatcctgtcccgaatcgtatcgtttcgtaatatcccggttatattgtgccggagtaacatccagcgtcaagctaggcaaccgatttgcccgaaaagtcctatactcccaataaccggataaatacatattctgcgtacggaatgattccagcgaactgtcgttagctagagaaattgtcctgttcaaatccaataccaggtgtttctgcgctcgaagctgggattcaccacagaggacacagaggacacaaaggaaaacaggaattcttttctttaatctattcataactctcatttttggactaatacttaatacttattttcttgttacggtaaataaaccagtaaagtaacggtatgataaataagctcaccgtcgtaccaatcgacattgttcctatcatagctatagacaacggtttttgtaactccgaacccatatctgaagaaaaaagcagtggcaccattgcgaagatggtagtcagtgaagtcatgataatcggtcgcaaacgcctgcggccagcttcatgtatcgcttctaataacggaacacccgctttacgcaattcattgatagcatccagcttcagaatagagtcattgattacaataccgcaggtaacgatcaacccgatagcagacatcaaattcagcgtatgtccgcaaatccagagtaaaagcagtgcaaatgcgaggtcaatcggtatctccgccaaaacaagcaaaggctgcaaaaagctttcaaactgtgcggcaagaataaaatacatcaataacagcgaaataaataaaatcaccaccagttcatccaacatctcactgttagaaaagaaactgccggagaatccagtatcccagtctttcatatcttctgccgtttgtttcacctcctttatcagtttgtttccgtcctgtacgccataaaaatcaaaaggaacatattccccgttacgtccggcagtaatactcttcaagtcctcggcaggagtaaccgtcaccagttcccggagtggaatgtactctctgtttcctctattgtccggttcagtctgtattagtgcttcctgtaatatttcattcaccgtcttctcactgcccgcaacgttgatcggaagatattgctggtaagaatgcaacatagtcacactattttctcggaaagctgttttcaagactctataaagttcattgtaagcaacacggtaaagcaatagtttctccttattgatacttaggttcagttggttctcaaaggcaatgcctgtaggagcaattcccgtcctacgggctaactccagctccacattccggatcgtttccgcttccggtgcttttgccttattacgggtgtaaaattcagctatgatatccggttctcccgtgacaaagagtttctcaaatacagtctccggtggagagaaagaaataacggaaagtggataacgttctttcagtttatggtatatctcctgctgcaaaggaatgattgtttctgatgtttccgttcggaaataaagttctgcttcggaagaagaaagttccctttcacgattcagaagaaaatcctgcctgccaacagatgccgtgtgctccaatacctgttcttttaaatccctaaaaagctcatccacacgccgcctgttttcatccacatgaatattctcattccactcgattcgggcaatcaattcattctcttctatatcaggcatccgctgcttgtcgataaagaaaaagaaaaatatacaaagcgggatggagacaacacaaaacaatacactaaacgttttgtgacggaacacccaatctacaccggcatcataaaaacggtccaatgtgtgatcctttatcgggttattgaatttaaaagaaagccatttccatttccgggtatgaatacctgtccgatagaccagcagataaagcaccggaagaagcataataccagtaaaatacgaaaccatcaatcccactgtaaccgaaaaagcctgatcatagaagatagctccggcaataccactcataaaaatcaatggagcaaacacggcaatggtagtcagggaagaacttaacataggagtcaccacttcactagttcctgttatacaggcacgacgcaatgaatagccccgctcccggtattgggatatattttctgtcacaataatcgaactgtcaatcatcatacccaatgccagaattaatccggcaagcgaaatgatattcagggacatattacacagatagaagaaaacaaaactaatcacgatagagactaccatactaagtccgatcaccaacggagatttcacatctcccaaaaacaggacagctaccagacagataaaaaggaaacctaaagttagattctgttgcagatttgagatcgtgtaatccaacaattctgtctggttgcggctgatactaaaatcgatttcaggatatacccgcctaaaatgctccatcgtccttatcagagactgcttcatcttatccatattctcgtccgcctgcttgataacagccagcgtcaccgcccttttcccattcgacacagatacgcctttttcttttacgggcacgatagtaactttgcagaagtcctttagttggacaatgcggtctcccttacgcaggtatatatttttcacatcttctgcggtacgcaacagagtggagaattttatattatattcatagtatccgtcgcgtactgtcatactacccggctccacattattggcagccaaagccgattcaatatcttcaatggaaaaccccatcatagccagcttatcctcatcgggtacaatctgtacctgacgctccaccaatccggtcacgtctaccatagccacttcttcgagctgctctatccttcgcttgatcaccgattcggcaaattcacacaaatcaaggaaagactgctgtcctatcgtactataagcactatcattctttaaggtcagattcaggtaaaacacgggtatatccgttgcgcttgccttaataactttcgggcgttcagtatccttgggaagataattcattgcagcgtctattttttcattgacctctataaaggcaagatccgtattagtaccgaaatcaaaagacagatggatcatacctgctccgtctctcgattcactatgaatatctttcaatgtagacacctgaatcagttgtccccgtaaaggtttcacaatcgtgttttccagttcacgggcagaggtattggcggcagacacctgtattgttatctccggaatggcaatatccggaagcaatgatataggcaaagtattatatgtcactagcccgattatgaaacaggcagtaaaagccatcaatacggcaataggacgctggattaaaaattttatcatgtttttctatctatcaattaactccactaatcactcatcactgacccgttaatcactgacctttactgccgcttcatgtgccagattcagatttccggtcacaataatcgtatctccttccagtaacccctcttcaatccctttctgtgatttatccgaaacaacatattccgttgcattttccaatcccgtatgtacataattccacatagccttaccttcttgtaaagtaaataccacttgcttaccggagcgtaacacaacagccgttttaggaatgaccaattgttgccctaaacttcttctgacacttactcttacattcataccactgaacagttttccttgtccgtttactacagccttcacctttaccattccgttcgaatctaccaatggattgatttcagatacgctgccttcaaacgaatctcctccggcataaggagtaatcatcaccttatcacctgttttaataaaagccaactcattctccaacactgtaaaatcagcttccatcccacgggtatcaataaccgtacaaaacacctcggaagtattagctaaattatatggtttagaaaacagattagccactatcccatcgaaaggagcaaccaatgtagcatgttctgtttcccttttcaccaattcatattgagatctcgactgctcatatccgctcttcactttcgcaagtttcattgtttccacaggaactttgctaaaatcttcggaggtatatccctgtccgatcaatacatctttcagttccaactcggctttcaacaaagcatcttccgcttgggaaagcttttgctccaagcgaaatttatcaagttcagctaagttctgtcctttatgtacgcggtcaccattcttcacataaatacgagcaataacttcacttgtctcaaaacgaagatcagcctgtccgagagcacttactttaccgttactgaccaattcgtgatgaaaatcacgtctctttagtatttgagtagtgacttcattcttagcatcaggaagaacagtggaaacaccttgttcctgtttgtcggcactattttttttgtcagagcaagaggacgttccagtccaaaccaaacatagcatcaaccatatacaatcatattttctcataataatatctttattgctatcaattacacatcatctatttaggataaacaaagtctatagtcaaatcatccgtattattttctgtatccagcatattatctacaaaaagaacaataccactataagagacacaccaacctgtaaaataattatatctatgttttgccaactttacttcatatacttttttcatctcatcatcaaacaacattaaatataaatcacgatcattgatcaatttctcaatccccatatcagcatcaaactctactttatcaatatgcaaacgggcatacattttatattgaggaatatacattacatcataaaaataaggattctccaacctatgcctttccaatgcagcataatcttttccggaagtacattctgccacaatattagaagtatagttactttctgccataacagagtttcgttcattagtaactatattcaaagtataaatggaagattcagccggataattatagataatattttcacctacataattgacattaggaaaagacatataagaataccctgcgctcatatcaggaataatatttgatggcgacaaataatagatagcaacatctttctctttattaataaagacttccttgaccgcaaagaccttagaagacaagttttgtgttaaaaacatcaaagattgacggttcttattataatataaacgggaagtatggatggcataattagtatttatcaataattgctccttatcatccagatactctctcaaatccactatattttttacagttcctctgctgtcaacgagaaaaacatgttcagaatcatcagatacccacactgaatctaatgaatgtacatatatgcctgacaaacgagatatagcatgaggacctttggcgggcaacgttacttgagttacctgttttgattccaaatccaggtaatctaatgaatgtaatctataattatatccgataaggatattcacagaatctccatgaacaggagaagacaaataataagactttagctgcagcacatcttgttgaggaaaatgtatttcttccgtttgcagtgcaacttcattatttactattgttccatctgatctcttaccagtacaggatatcaatagcatacaagataggaaaagcaacaaactattttctactgttctcattgtgttctatttttacgttttatacaactacaaaaataacataactaaaatacgatatcctgattatcaataataaatcttcgtataagaataagatataaccattgttaactgtgctcattcatatttcatcatatttatcagtttatttgtttcaataatttctttacttccgctctcatctcttttaccgctgtcgattgaacctttggttcttttgtcagtacaacctcaaccatacgctttaatttctcaggttgttggttttccggctccgcatacagctttgccagaagataatacggataaattcgtcccggaagtcgatgcgtagaccgaatcagactctcttccgctttctcatactttcctactgcctgatagttcttacctataatattcagaatcattgggtcattactatactccatggcttctttcaacacttttgtagagctatcatattgtttcaatttatgcaaacaatacccgtattcaaaaagaaaggctccccgattcttcaattcgggatacaacgtctcatattcttctttagctgattgatatgctccgatattatagagcattttactacgataccagttcttacatgcatcatattgattgtttttccaataatatgcccctaatagaattattatcgaaataaaaaataatagcattatcttcgagcgtccaataacacaagcagccagcagaaaatagaaggtcactgcaaatccgggaatctgcatcggataagaagaaaaagcaaataccaacactgcaattatacctccacaaagacctattcgtccttccctactccccttccaaagacaaaacgcaattattaataaaacgacaaataaaaaaggaatcccatattctgttgctacttgaagatattcattaaaagcacattccggactacccgccaccaattcttccgtttccgaatactcttcgtttgcaaaataactctcctgtgccctgccataagctgaaacaaaattcccagttccatgtcctataagaggactttcagcaatagcaagagtactaattttccacatgaacaggcgcccattggcggaagttgcttttaactgaaaaagtgagtaaccaatcactatgaatataatgcttcctgcaatacaggccaacacaacttttctcttatatatctttctaatctcctttagtttacttccccatgaaatgtgcattccatacacccatgcgcccgatacggcggcggcaatccaagccgaacgactcattccggcaggtagcacacaaagaatcaacagcatcactcctaatgccatgtaatactttccctgttctatccatgtacgttccgtcttttctttcaaatttagccattcatgcaggcaaagcggaaatatcattgccaaatatcccgagtaaggtcccggattatagaaagaccctgtaagtgcatataaggaatgattagaaacagcgaaaccatatatttgcctcaagccccatatagcttcaatccctcccaatataatcaatacccacgtcactattgacggaaaagacagatattgtttcttattcaagcaaagaaaaggcaaacaacacacagcaaaaacaacagtcatgcgtcccaaccatagtttttgataggccatttcaccaacagatatgtcgttcggagtaggaaaagctactacacacaggattaacgcaactcctaagagtgctatcaaacccgccatacctttcctttcaatttttatcaactttaatttgactttcatgttcttcaattatctgactactgcccgataaaaagcaataaccggattatctccctctacatcatacgttttaaataaatccggataatcctcaagaggattttcagaaaaagcataatcgagatactctggtgtcaatatgctgtaaaagcaatccttataaataccgtcaatcgtatcaattaaagatgaatccagaaatttaatccttttggcacagtatacttgtttactctcttctacattatataaacaagaccaaatatatccatccttcacaaaacgaaaaaacaataatccgccatactcatatatatcagttatacctaaggagtatcctgaacgcaacaaactcatttcattaggtctctcttctatcatcgatgctggcaaggggttcggcaaattaatccgaaaacgcggaacaacactatcttcatgaatctgataaacaatattatcaaaatccctacaataatacaacttcgaattattatcatacaaattgtgtcctgaaggcgaaaatggatagtcttctttattattttcatgtttaaagtatcgtttccctatggtaatgccatcctttgacgctaacaggtaataatgcaaagaaatatcatcttgatagtttcgatgtaaacggttatgataaaagaagtatcctccccaataggctatttcagccggtgtaggtttattaaacttctcacttttgacaaacctaccatcctcggtcgaataaaacatcaacgactgtttcatattatcataaatcaccagttgatgcaaactagcatttactgcaaaagcatttatatccgtatattctccgggaccctgccctctagcattcaattgaaataacaattcaccggacatatcataacatacaatgcctactacaagatcccataaataaattcgttcatccgcaatctggatctttttaatacggcttaacaaaggaatcgccgatagtttaacgtaagatacctgttgcaatatagtttccagcttatcataagtttctcctgtcatttcaacgataacgtcctgtggactagacagagagacaactccggggccgatacttaaagacgttttattatgagtacacgacacagtaagacaaactaccattattataataatacacttattcattttttaattacattccacaagctctgggtgtacaagaattaggagttacacaaaattcgcatattctttctatgctggcagtatgccacggaccttgctgataatcacatgcaattgtcctaggagctgtccaagtcttatcgccattctcacgactatttgccaacgcttcaacattagacagaaccaaatcagataatgtctcttttttaaacgaattacaaatattagtaccaatcatcactagtaatgtaattcctaaagccatttttaaataaattttctttttcatacgtaactaattttatattaaatctgatagtcaatatgcctttatttgattttcttcatcatcctatcccaacgaggtttctccgtaaatttgtcttctgaataccagatacgggtagccttgcctacaatatattcttccggcagcatcccccaataccttgaatcctgcgaattagccatattatcaccagatacaaaataataattcttttcaaaacgatatcgagaaatcagactgtctcccaataacacctgtccgtctttcagacgcaatttcttcttttgttcccaacctatcaattgcttatacaaatgataagtagtgcggtccatttctaccacatgtcctttctgtggaacaggcaatggtccgaattcacgaatattccacttaagttgtttgttatatggaaatgtaccaaagacaatcccgtgctgcttcggatgctgcaaatttgcaatatactgttgagcctgataattccccacctgttcattgcaaccacgtatcttataaaatcctcctctgatttccaatgtgtctccgggcagagcgatacaccgcttcacataatactgcatcacgtccattcgaatactatcccaacgattttgctgataaggaaaattaaaaaccaatatatcatttctcttaaagtttccccatccgggcatccgatgaatagtgaagtcttcattatctaaagcagcaaacacattaaataacctagctccctttatcatcttattaaccagtatccgatctccatcctttagtaccggttccatagaatccgaaggtattttaaacgaggtaaaacaaaatagttgtaccaagaagagaatgagcaccatgcagaatacgaaaaatgccagattctctaatattgccaaaattttcctcactttgctcatacgctttctttcagttgaattagtttacgataagccataagccccaacacgcatttcacacgttcatcatcctcatttaataatccttcgcaaggataaacgtctttttccatcttctctcgcaaataatccgcccataaacacaatagattccaatgtgcatcagcataactgaaatcctgttccacttctacaatcacagccatcatcatcaacatgtcagcagctaccgccactgcattatcatccaattttacctgcttattaataatagggtacaaacctatatcataaggcggatatctctttacccaatgattatcttcacaatattcaaatataggatccaataggcttttcatccagtcgatacgattaaaatagagcaaagtagaaaaactctcataagcctccctgatattacctaaagtatctccaaagcaaaatattttattctctgatgataacacaaatctatgggaagatataaaattacgataagaaggaagcatctgccctgcaaatgtttcaccacctacttgaaaagctctggcactccactgacaatcctgtttatcgcattcttctttaagttcctgccatctatctccaacagatttcattaattcttttatttcgcctgttctatttttcttccaaagaggggacaaactttcacccccatattgtaaagtctgcccttcctcataccctattagcaatgcacctttatcctcattctttgcgcttaacttttgagataaaataacatgaccatcctcactagagaaagttgattcattcgcctccatagctaaatataaactgtcggacttggcaaaacgccaattctgttcacaccaactatccaccttgctcctacccaataaccactccatatctacatcaaacagaatttccactgtatgctccttttcatcttttgcatgaatctgataagaaagaaaacctacaggccatcctgtcatatcccatttctccgacaaggaaggtgaaacaaaatcaatcagaagctccacatctccacattgaaaaacataatgagtctgtgtagcctgcatattcatttgtttcaatattgcaggtttcacatcaacataagtcttattttccacatataaaccaaaatccaaaaaagcagtaccttccgcattacccccataagctgctataacattatcaccattaataatttgagctactgtttcatccgttaaacgatagcatcccgtttgaggaagaaatgcttcttctcctaacaaatattctccattacaataaagctttatctgatcatcataaatataacggagatagactttgcgttcttttaaagtatctttgttagcaatggtaatgtgcctgcgaacatatatatttttcgctccccatactgtatgggcttgaaacttcccattttccgaaccgaaggcacctttacccttattccacaaagaatcattatactccctttgttcccatcctctgcccggaaataaataagaatattttccctgccatcccaggttctcgtttgaaagaggggctagagaggatatacgtaacgaatctcctcctaaaaaacggtaagatttaccatccacctttaaaatacccgtcaacggaaacattttccccgatcttaagcacggataggttttatttaaagtatcttctgttgcctttatggtaaaaccgggagctatagccaacaacgtatgtccggagaaagaaatatcaaaaggaggacacaccttcttaccggaataagaacaagcacatatcaaggagataattcctgaaaataaaactatcctccacattacaacttgtctgatattaaactttacctccattgttgttctccattttcataaacaaaaattctttcatcctttccacgagtatggtttcgtaaaagtaataatgcattttccggaatattccgaaacaccagtgaatcggcagtcgccttgattgtcccggcagattgccagtctctttcacagtagaataattcatatacatcaccaggtcgaacataattatccctgttccgcggagtataaactatacgatcgacttttacttcttttcctaaatccaatcccgcccatccaccggtgggtttggaataatcaaaagaagtccatgttttcccgtcaaagacattggtatagtcatgatccccattctgtttttcgtgttcgggagttcctattatctttcccgttaaagcaacagtatcatttttctcataaaaggcgactgctgaaacattacaatgagctttaggtcgaccgatatatctaagataacggtattctttatcagaccagcattttacagtagtattcaaacgatcaggtttactttgtataataaacagtgtatcttcatccgaaaaatccgaatgattgcttccggtaaaaacaccccctatcattctgtttctaaaactactttcttctttaagattaaacttagcatacaaaaccatatcttgcgtctttttcccgacggaataatagtgaggggcattagtttctttatccagataaaaaggatcagtcaagaaatgtaatgatcctttttcataagtggcaactcttaaaactgcccctttacgaacatatcgaaaagccaaatgaccggcatcgtattctgtccaatcaaccggaatccaacgatctctattactggcacataaataagcaatcctcccactccttttctctttatactgcttttccaaaggaatgaccagattcttttggtatgaatacgcataatcaaaagttacatccttaaacttaggaatatgccaaaatggatgtaccttctctccatattgtgacatctgttcatgtaactctctgtttacactaaatgtatatctatatatcttggcagttcctccctgccgatacaaagcacatttgcgaacacgtgtcaaaaatgtcataaagtcggacatatatccttctccgtttttatcccatactattgtccaaagatgcccgaaattcgtatcattacgtgcaggtaagtagtcgattgcacaaggaatacctaaagcacgaaataagtaaatctcaaaatctgccaattctctacaactaccgactttatattgtacaaattcaggtccgatatgtccgaaagaaaagggagttatagaagtaaagaatgtctttttatccggcaatctcgccattaaatatctggctgccactaatggatcttctttatccaaggtgtcagacatccgcaatgaatctaacaatgaattgtatttcttataatatatctcacgccaataagttaacggttcatcccctattcggtaaggcaataagtactcacaaaatgtttcaaacgaaatattctttccccacggttgctcctgccaaactttaaatgcccaatcaatattatggcacaaatatgcagaatccatttccataatatcgcgtttctttttaggttctttcattgcaccaaagactttcttgactgaatccgaaacttgttgcgcagttttacccttacgtacttttagccaagcataataagacttataattctctaattgttctccactagaataaatgtaaaaaggcatattctctattaaaaaacaagctgctttatattttagactatcaataggattcttcttataatagtgaagtactttttgaagttcttttttatttccacctgccgcctgtaaagcaacttctaaagggagcatagtttttttttcgtagaataaatactttcttgcatattgccattctaacacaaataacaaaacaaggatagatggaatatatatacaaagcttcttaagcataaattaatcctcatttacttagtatttcctgttcatgttctctactgacctttctcatttatcataggtcaaaacaacgctaaaaaatgtatttttttatttcacatatatattcattaataccggattactatcatcaaccaaattatatttacgagtaacagtctcctcataattattcaaaaaagactgagcattaatataacttatataaaaatcagaagaaactgctgcaatcttcgtaaatgcttttatttgagggtccaaaagagggcaaaataaataaccttctttctcttttgcttcatattccaaaagtaaaggtgctccatggtttctccatatttcggccagaaaatgtcccttacattgatagaatgaattaacacctgaaattaggcactcattagtagaatattgttctcttacccctctttcctttttaaagtccttttctaattcaagatctgaattatctacaaaatcatccgatattattttcatatatttgcttacttcatcattatctatcatataaatatatggagaatatctaggattaaaaaataaatgattccctgatttataaaaactttgggctttaaatggagtattagcattatctgcaatacctctagatgctattaccggaacaaatttctcattcgaataaaatcctaaacaaataccgtcttcagtctgaaatatattggttccccatatctttcccgttttttcatcaacagctatttccattacagttgcattagttttatattctgtaaacagcttgtaatcaggatatttatattttattatttttcgtcctacaatagatgatatgtatatatttaaatctgcatctatatcaaagtctgatatatcagcatattctcctggtccactccctatattatgaattttagtaatatatgaaccattatcgtcaaataaaaagatcatagcttggactttatcaaaaatataatatgtctcattcttatacaatatcttagttatactagatattaatgatctctcatttgtttctaatggaacaaaagttacagaatcaaattcatgcaaatgattcttcttactacaatagtcatattccaacaaagtaagattcctatcttctatttcttttaaagaattattacgaggattattgcatgaaaccaacaataataaaaaaatatatacaattatttttttcataaacgagctataattatgtttcttttattaaaaagaacgtattattagaaagtaacaagacgaccaatcgccacatattaattaaacatcagatacctagtaatagatatctgatgtttaaaacctagttaatttggacaatctctattcctcatcgtagtaacacccgaataacatctgtcactattaatactaagacaaccgatatggctattataggttgtaacaagacacccatcctcccaatgagtttcttcatcactagtccaactatagtcaggagttctactacctgacacatcagtttcacctccagctagtgcatctatattagccaagctaaacaatgataacgttgaagattgagaacctaaatctattttgatattcaataccgccacagttactatggctaaaacacatattccactaaacaaaaatttcttcattatctattttttttaagattaaaacctaatataaaaatcattattcatttctttgtttttcacataaataacacctccttacttaatatatagcttttatttactttgattatttaccttaccttgtattacaagtttaacatatcttctttctatattacaatatattgtaacatttttcttaaaatatccttctttattaggagtaacttgcactacaatatcggttgttttattaggtaaaaccggttgttttgaccagttaggtactgtacaaccacatgtagtagttacattattcaccaccaaagggttaggtccaatatttttaagactaaactttgcagtagtagtcttatttatttccagatttttaagttccaaaatagttgtatcaactgtcaatgatgttatcaaagacttatcatataagtctgttttttctactcttttattttcatttattatttgcttatacaaactccatatttgaggattctctgtaggattaccaatgcaaacgaccttattatatttatccaacaaaaaagtctgatatctactgtctttgggaaatgtattgagtttatcaagttgattacatatatccatatagcaaggatatttaaatgagtcctttctaaataaaaagaatatttcttcgatatttttaggatgaaaataaaattgaaaattaacaaaacctgccatttcgtcattaacttccttaataatagcattccatttatacaaatgtaatttacaactagtgcatcctattgaatctgtgtatactagtattttataaggcgtagaattgggagaaatacacaaagtatccctatcaatcgatttacaaaaaacatcttgaggaaatataattttctttcctgtccattcttttactatcttttcaatttccgttgatagttgatcatttttacatccacaaaatgtaaaacaaactactcccaatattagaactacacccttaaccataatacaaaatagttataactaacataatttctcatttataataatattgcagcaaaattgctactttacctatttaatactaaacattacaatcggctgatcatcattaacatctgtcgctattatcgttttagtatcttcatccacccaaataccatatatataatggtcgagcacatatttgcataacggttctccttccaaactaaatacataaatatattttcctccatcaggaagccttccgctttgtcttgcgatctccttaaaagacgttccatgaaatacagtataaatggcactatctgttacttgtacatcactaaaacccataatacctgttggcataccatatccatctgatactttgaattcaggttcaccatgctcaccgatacgaataatatgagtactatctttcaaattataaacttcaacgacttctcccaattgggttactgccgccaatattccattgttaggattgtagtcaaggaagctcctccatgcttgagccaatgccggacgagcattttccaatgctttttcatcaatagtcggaataatccctatcttatctataagcctcccattacggttaactcgacataaacgattttcaccggaatagtcaggaataataaacattgaatcattatatatagcaaaatcaagtggtcgaagtatatcttcatccaatgttaccgtttcgtcacgaagcagtgaatcaccggatgaagaaaagtctaacctagttaattcacttttattggcatccaatgtccagactacatgattctgtaaacgaaagttctccattgataacatttctgtaggtgaatcaccacgcttcccaaaagaagataaatactggaaaccaggatattggaataagtgtccataatgatcaagaccatgtaaatccatcacaatggctctatctccttcgattcgtatcctaaacggataacgaagcaaggctgtatcaagctcaatcacttctcctattaattctctctcgtgcggaaatcccgaatagaataatacaccctttgcatattctttatgcttatggtcacaagagataaacaagaaaaaagaaagaaacaggagagttatactatttttcaaggctatatccggtagcaacatattctactttaacttttgtaaccggacaatctacggaaccactgccccaacaattagtaggcacatcttgctcatcagccgccaaagcttcaatattatctaataataatgtatttactcgaggttcttttaatgagtaatttacagaaagaaccgccatcatcaaaatagaaaagaataatagtttcttcatatatactatagttttatcgattaattaatgaaaacgaaagtaagcaattggattgcaactgccaataaattaatctatccatttctatctaaccgaatctatccgctatatacactatcatagagataaggctttcattcaaaaaatgcctatttcatcggaaattatagtttttatttgttccttctcttttccaagtagtatttttcctaaaaacagaatgttattcttttctattacatacaattattattccgatctatcttatttaatcttttaatttttctcttatattgatatgcacctatattatataacatcttattacgataccattccttacaagcaccatattgattatttttccaataatatgttccaaacagagccatcatcgaaataaaaatacaacgctcaagatggcttcaactcctgtaagagttatcacatctaccatattcttttttgtcattcgtatcaatttcaacttttttcatgcttaaatcctatctatagtgattatagctgcacccttcacttctccctattcatcggggataggtggtgaaggggattccttcaccacctcttcaccagtttcttcttatagctaatccgattttcattatagctaattcaattatgctcatagcatcttgttttttcttcctaaggtttgaaacaaacatcgggatgtttgtgaaaaagacgctagatgattgaaacaaacttttagacttttgtaaagcaccgctttaagcaggttaaagctatgctttgcaactcctaaagcacaactttagattttacaaaacaacacttatccgtaaaggatgggtgaaaggtggcccttcacccgctatccctcatgaataaggagttgtgaagggtgaaggctatatcggtttttatcaatttatgtttcatttttcatttgattttcttcataattctatcccaacgatttttctgataaggaaaattaaaaaccagtatatcatttctcttaaaatttccccatccgggcatccgatgaatagtgaaatcttcatacgctttctttcagctgaattagtttacgataagccataagccccaacacgcatttcacacgttcatcatcctcattcaacaaccctccacagggataaacttctttcttcatcttctcccgcaaataatccgcccataaacacaacagattccaatgcgcatcagcataaccgaaatcctgttctgcttctacaatagcagttatcattattaacatgtcagcagccatctccactgcataatcatcaactttcacctgacgattagcaattgggtagattcctatatcataaggaggataacttttcctccaataatcattctcgcaatattcaaaaaccggttccaaaaggcctttcatccaatccatacgattaagagacaataaaatcggaaagttactataagattctctcacattggccaaagtatctccaaaacaaaacaaatcaccactttgagacattacaaaacgatgctccgatataaattttcgataatctaaaatcatctggcgtgcaaacgatgggattctcgtttgaaaagctcgcctgttcaactgcccatccaacctgtcacattccctcattaatttcttataattgtcaccgataaacaacaaagcatccttcaattctctttttccatccttattccaataaggatgtagaatttccccctcatattgcaaacccttcccttcattaaagccaaaaagtaatacaccctgatctttcttgtttttccccagtttctgcgaaagcagcacatgcccttcattatatgaataagccgtttcttcagcagctatccccatatacaagctatcagacttgacaatacaccaatcctgttcagacaggctttctactctatttttcccaaacatccattctgtatctatatcaaataaaatttctacatcatgaatttctgatttgccagaatgaatttgataagaaataaaacctaccggacatcccattaaacattgttctagtaacaaagaaggagaaacaaaatcaaggtataactcaacatctccacattgataaatgtaatgagtttgcgtcgcttgtacattcatttgtttcaatattgccatatccacatcgttataggttttattttccatgtacaatccaaaatccaacagagcattttctttcgtattccacccatgtgcggctatcacattatcgccattatgtaactttgcaactacttcatcggagagttgtttacattcaattctattgctaaaataatctacctgataaataggttctccattacaatagatttctgcatggtcatcacatttagaacaaacatataatttatatccttccaatttctttttatcatttatgttaaaatgtctgcgaatataaatatcggctacggtccatgttgagtgaataggataaggacgattctctgctccccaagctcctaacccgttataccactccttatcatcatattctttccgcatccaatcatcctttggatgcaaataagagtatctagcaggccacccacaattaattgtagaaagaggtactagtggaaaaggacgcaacgaatcacctcccataaaacgataagatttaccatctacttttaaaattccgatcatcggaaactccttatttcttgataacttcggatattttgtatgcaatgtatttccaacagtttggatagaaaaatccggtaccaatgccattaatgaatgattggacgcaatacatataggaataacttcattctcctctttatcattgcaacatgcatgtaaagaaaagatcatccataaaaatattattcttatcccccacccgattttgttatttatttgcatatctgcctcccgttttcataaacaaaaattctttcttccaccccgcgagtatgatttcgcaataataaaagtgtatttttaggaacacccgaataaaccaatgaatcagaaagagcttgtttctttcccattgatttccactccttatcacaatataataactcgaatgtatccccagggcgaatatagttatctctattacgtggtgtataaactattctatctacccgtactttccttcccatatctaacccgctccaaccaccggacggtctggaatagttgaaagaagtcttagttttgccatcaaaaacattgtaataattcaatcctttatcggtatcctccaaaggagttcctataatgcttcccttcaaagcagaagtgtcattacattcataaaattcaacttcagccacattacaatacgtattcttggctccaaaatatctaaaataacgatacttcttatctgaccaactccgtacaaccgttttcaaacgaccgggcaccttttgcaccataaacaaagtatccttctctgaaaaatcaggctgattactcccttcgaacacccctcccaacattcttcttctaagatgaatttctcctttaaaaatattgtacttagaatacaatactacatcttgaatttcttcatgttttgaataaaaatgaagttcattggtatgcggatctacataaaaaggatccgttacaagatggagcactccttcctcataagttgctatccgcataatcattcctttttttatattcctgaatgtcatgttgttgacgtcatattccgtccaagcaaccggaacccatttatcccgtttacttgcacacaaataagcaatcttcccgttacatttttctctatatatttttgatggaggtatttttaattcttttttataataataagcatattcacgagttacatctacaaactttggtaaacgccaaaatgggtatagttcttcttcatactttctcatttcttcatacatttttctattgacgcaaaaagtattcctatataccttggccgtattctcctctttataccacatattttcacattgtcgttcaaaggcttttggaaaatcagcagcaaaagcttcttgattcttatcccatgcaactagccaaaaatgtccggcattcacgccactacgcataggtacaaagtcaacaccacagggtatccctaaggatcggaacaaatagataccaaaatccgttgcctctctgcaacttccagatatatattgtacatatctaggaccaatatgtcccataagcgcaggtgatgtagaagtaaaataatgttctttatccaataatctgtctctcaaatattttgcagcaacaatagggtcttctttatccaaaacatcagacatccttaatgaatccagcaatgaattatatttttcataatacatttcacgccaatattcgagtgtttcatcctcaatgcgatatggcaatatgtactcacaaaaagtttcaaaagaaacatttttgccccatggttgttctcgccaaactttaaatgcccattcaatattgttacataaatatgcggagtccacttctcttatatcatgtttcttttcaggttctcctaacggaccatatactttcttgactgaatccgcaacctgtttcgctgtctgtcctctactctttttcagccatgcataataagacttatagttttctaactgcttgcttgttgaataagagtaaaaaggcatattttcaattagaaaacaagcagctttgtattttaggctatcagcaggattcttttgataatgacggagtactttttccaattctttcctgttgtttttagcagattgcaaagcagctccgagaggagttatcatttcttctctgaatgtaatcctatctattatttgccatcctagccaaataaacagcaccaagactataaattgaatatatcccaaatacttcatcaaaccttttcttaattattcattttgcatttccactaattttcaaatggaacggagagccttctgcattacaatacacggttatcgttttatcgaaatgcccagaatgttcagcttgatattccaccttcactttcaaatttccacctggttgaacaggttctttagaatattccactgtagtacacccacatggagtataaatttcttctacaacaaacggattatcacctgaattagtaaatgaaaactctacaaattgcttttttccccaattaaaagttcctatattgaactgatatgtagataaaacaactgttgttggagttctactatcaatctccttcaacagagattttttccctgtaataatattcaaataaagttcttttatcttaggattatgaataggattgccaatagcaactaccctattattcttatccaacaaaaatgtttgaaagatcgtttctataggaaaatgattcaacttattgatactatcatgctcatcaatacatacaggataatcaaagccttctttcgttagtaaatactcaatatttttcctgctcataggatgaataaaaaaaagaacattacatgaaggacaagtatcttttagcaattcaataaaaggtttccatgcactaaaacttaagtgacaccgcatacaaccgattgaatcgacatatgttaatattttgtagtcacaatctctttcataataccccataattgtatctctagcaaatttcgtaaaaataggaacactaggaaaatctatttccttataagtccattcttcaactaacctctttatttttttttcatcatgctcataacatgaaaacaaagaaaaacatataacaaaagaaatcagagggataacaatcattctatacatatgtttatctattttattttaaatcttattaattcaggatcaggcatattagagaaagcatacaacatctcatctttattatccacactaatcagtgtaactggcacattcagttcatacttttttatggcttctccattccaatcaaaaacataaattattgttcctgcaagtgtttctaaaccattttctttaaaatttttgcctgaataaagtccatatacatatttaggagaaatacacaaacttataaatgtactattattggaagatgaaattggggcagctcgcatgtccccttcaacttgagttttataaatagggtagttcatttcatatttctttattaaagaaatatcagtattatttattttataaaaatgaataatttcagaagtatttactgcataaacaaatttatccataaatggatttaaacggataataccttgataagccataccacgcaacctgtttgctatttgtttctcatctccatctttatatggatattccataaaatgctcttcttctattagtccagtaccccaaagtctgaacatacagtcttcgtaaaatcccaaagatacaaaagtattaaatgctgtaggaaacactttaatagtcccaggaatagtatctttagttaaaactgaaaagttcgaaattcgatttttcacatctgatatgttcataacattcaaagtctttttatataaatcataaacacttatggagctcttaccaaataactgtatatcaaaaggcattaagaattcattaacaccttgccctttctttccgaaatcatatattgaatctagatcattcaaatcgaccaaatgaaataaaccatcttcagacttctcatcgaaaacaataattgctgaatcacaatatatcatatccattggagttccccaaatataaccgtttgatggtatcttttcatattccaagaatatcctattcgtaaacaaatcgtctatttgacagtctgttttaacatttttacatgcacaaaagaaaatcaacacaaaaacatatttcaatttcataatatactaaattcataatagtttatagaatatttttataaagctatattttaatcggctttatttatgcataacaaatctagaagttgtcaatacacttcaattggggctgactaaaaagattttttcacaattaccccttctccagatacctgtagagggggtaaaaatcaagttttcgaccttttttattcagccccaatcccaagaggatattaaaaaccaacagttatagcaataatatacagaattatactgatgaaagtatagtttcaaactctaagtaaatgttaacaagcatattttccatgcactttcatcaccttcattagaatttattggtatagtttatagccccttatagctagcccttcactatatatcacacaaatacctgatgtaactacacaaaagtcaaaatccacttccgcattattagctaacgcatcaacattacaaagtaacaaggcagaagagcttttagtattccaattatatatactaaatgtagatataaacaaacaaattatacctactacaacatataaacttttagctttcataatatttaaatatatggacgatattcaccaaggcatgcaccccaatctcctaacgttcgacaaatttgcaatcttgtataaacacaacctatgcattcatttccaccttcttttgcattagctaaagcttccacattgctcaacaccaagtcagacaacttcacatcattctgcgaagtatatacattatatcccgcaatagcagcgacagcaacaactgctatcacacctaatactttctttttcattcttcaataatctttaaattacattttatttttctcttctgcatctatcatttcaacagaatagcaatagtttgctacattaatttttattcttatgtttgcatccgaatcttttttaaagatttaggagcaggtgatatgtaagcaaatcctgcaagataaacaaactcatcatcctgctccttttaatcaagttaattatctcattcagccaaagttaaacttaagtattggctcatcattatttacatctgtcgctattatcgttttcgtagcttcatccacccaaataccatatatataatggtcgagcacatatttacataacggttctcctttcaaactaaatacataaatatattttcctccatcaggaagccttccgctttgtcttgcgatctccttaaaagacgttccatgaaatacagtataaatggcactatctgttacttgtacatcactaaatcccataatacccgttggtataccatatccatctgatattttaaattcaggttcgccatactcacctatacgaacaacatgagtactatctttcaaattatagacctcaaggacttctcccaactgggtgactaccgccagtattccattgttaggattgtagtcaaggaagctcctccatgcttgggctaacgccggacgagcattttccaatgctttttcatcaatagtcggaataattcctatcttatctataagcttaccattacagttaactcgacataaacgattttcaccggaataatcaggaataataaacattgaatcattatatatagcaaaatcaagtggtcgaagtatatcttcatccaatgttaccgtttcgtcacgaagcagtgaatcaccggatgaagaaaagtctaacctagttaattcacttttattggcatccaatgtccagactacatgattctgtaaacgaaagttctccaatgataacatttccgtaggtgaatcaccacgcttgccaaaagaagataaatactgataactgggatattggaataaatgtccataatgatcaagaccatgtaaatccatcacaatgactctatctccttcgattcgtatcctaaacggataacgaagcaaggcagtatcaagctcaattacttctcctattaattctctctcgtgcggaaatcccgaatagaataatacaccctttgcatattctttatgcttatggtcacaagagataaacaagaaaaaagaaagaaacaggagagttatactatttttcaaggctatatccggtagcaacatattctactttaacttttgtaaccggacaatctacggaaccactgccccaacaattagtaggcacatcttgctcatcagccgccaaagcttcaatattatctaataataatgtatttactcgaggttcttttaatgagtaatttacagaaagaaccgccatcatcagaatagaaaagaataatagtttcttcatatatactatagttttatcgattaattaatggaaacgaaagtaggcaattggattacaaccaccaatagattaatctatccatttctatctaaccgaatctatctactatatatactatcatagagataaggctcttattcaaaaaaatcccatttcatcggaaattatagtttcttatttgttccttctaatttgtaattgatatccaatattttcatacctttgaatctcaatagatggaacattctcaaaaactcttcgcaaacgacttattgcattatgaagtctcggatcattatttgatttatccgaccaaaatattttcttgatttctttgtctttcaatatgtaatctggagcttctaaaaaatgttttaataaaatagctgtttgtggtggtatctgaatttcctctttaccaaatataagctttctcaaatctgcatcaaacataatatcttggtccatttgataaatatgaacagaggtaggaacaacaatgttcttttgccatctctttctaaaaaatatcactatattaataataactgcacacagccaataaataaagccataaacaaagcctcttacacccacaagagtaaaaaatgaaaagtagaaaaagccttttacttcaacctcgcaacgataacctgccgtaatatcgaattctggtatacaattttcatgtaaaaaagagtcagggtatacactttctgtaatattttcatctttatcggataccaaaagctgcaatgcaaaagtgccagacaaactttgctgcttcaaatgcagttgccatttttcatataaagagtccactactaaaggatgtttagataaataagcagtatgtaaaaaacttaatcgtggatcagatgttacatttttagaacttttttctttatccaagcagtatccacgttttccactttcatctgttatataaaccgtatcaggatactcctccaatcgctgtttcctcccactagtgtaaaaataaccatcaaaagcatcttcttgtaaatgttgcaaaaaaactgctttaaaaacactttccactctttcactgaacattttttttctagcctcacaatataattgtcctagaatgaaaaataatactatctccagaataaatattattagcaaaaggcgcatcttttgtttatctttaaatgtaattgtaccgcttagtttcgttagtaatttcatagcgtgacttattttatctgtttgaatagcacaaaggtagcattatttgcaataattgacagacaatataaaaactattttgagtttttggttatatcaaaaataatctttccaaccaaagaaattagtctatttttaagattcactctataaatattaaatcaaaataaaagcaagaagagaaataaatgcataaatcaatgcaagaatataccgttttcagactaaatattacataaataagggataaaaaacgaattatttaccgctaactaagctttgttcctcaccgaggaacgactcgttgcccggtgtgcgtcgcttccttcctcaccgaggaacaatacattcatcggtgagacccaaatttatcggtatattttcagctatttcacactatattccatccaaatcaaatatagcaaaaagaaagtacttatcaaataatcaaacgaatatccgcaaataatctctttacagcaaacaataagcatccaaataatataaaataaagcaccacggatttccataatccctaattactcacatatttatttgcatacaagactctgtcttaaattcaagcaggagaaacgcataaaatatcctatttttatgtatgttctcatttcaagacttctatatataaaaaatcctatatcatgtctaagatgatataggatactaacaattatataaaggcgtttattacaacgcctttatctcttctatagacaaacctgtgacttgcgaaataacatcgagaggaatatttaaagacttcatattgcttgcagcttcccttttctcttccagacgaccttcattaataccttccatacgaccctctacacgcccttcagcatgaccctctgcgcgtccttcagcacgttcagtgaatatattatcttttaatatgacaatattatccaaatggcgatagtaagcatcaagctctgctttagtcatcttgtcaagttttaatcgttcacgggcttctgttaaacctggagcagtcgcactatcaggaatatcacctgtattcagataatagatccattcttccaacggacttttagctacctgattaaaatcattgaccttcaaaatataatattcaggataaagttgacttactgtatccactttaaaagtttgtttttgaaaaggagtcagttcaagcatatctccctgatgaattccccggaattccgttttaccgtgatatacggtatctttgccactacctaaagaaaaatagacaatattgacactatatactttacgtaccttatcataaccttctccacgattaatatactcggttactaattttgaagtaccaaacagcatacgttgaaaataagcatactcattattattctgaacttcaatcagaataagttcacctttcgagttttcagcaagcatatctacacgattatacttatcaaactcatcttcttgattgctttcactctctaaaagcttccgaatgattatcttttcattcaaaagagtagttagaaagccctcaagaactgcaaaattggctttattacgcaataaacgtttcatagcccaatcgaaacgaatataattacctgacataagttcgtctcctttcttgttatcttgtttcaagctaacaaaggtaagcagaaaatgtttgatttcaagtatatatgcttcaatttctttctactaagaatattctatcttccactgtcccaaagtccgcgttgtactatcgaaattcactccaactttaacaaccttgcgatgctctacctcataaggaatggcatactgtttactattaatttgtgccaacgcttcttcgggagttccgtctaccttaaattcaaacacataaatcgcatcaggcatcttgattaccacatcagccctaccaatagcattcttaacctctacatccacatattgccccatcaaacggaataacaaatagaaaatagtctgatagtgcttttcctgattattctccaaatcataaggtatagaagaaaagaaagaacgagtacgaagaaggcactgctcaatatcacctttcatcaggtctcttacaaaagagactacataaaaattactttcacgtgtcggttgattgagataggaagggatcagagtctcaataaagcctatcttaacttcttcgttgggataacctaatgtatatgtacgaaagagaggttcatatcctttaatagtcaaatagccactctgataaagtacaggaatcggatcggtaataacctctgtcgctttatcaaaatcttcgtctttcacttccatcttttccaatagagtaagactgaagtccattcgctgtaacatttcaatcaagaaagtaggcgtgccggtagaaaaccaaaagctcttataatctctttgcgaaaatgcattgaaaaggctgaacggattgtaaatatcttcacaaatcttgctgaaatgataaccgtcatactgccgtttcaaatgccgacaagcttcttcataggtttcattattcgcttgagctatcctctcaatatccggttgcatctgacttagcaactcttgctctgtaataccacaaatagcactataatcatcgctcatactgatattctgcaagttattcagctcactaaatatactcatctgactgaacttgctgattcctgtcagaaacaagaaacgaagatattgcccttgcgctttaagaggactgaaaaacttccgcatttcagttcgcaattgtccttgtaaagcagagtcgctattactatccaataaaggtgcatcatattcgtcaatcaatacaacagcctgctttcctgtctgttggtagattcgttgaagcaaaccggttaaacgggctgcatagctcgtttcttcttcatttttcccataagtcctctcccattcgcttagataaagattcaattgctcttgcaaatcttcgattgtggtgtatttcgttctactaaaatcaatatgcaacacaggataaacagtccattctttctctaactgttccatagccaatccttcgaacaactctttctttccggaaaaataagcttcaagagtagagactagaagactttttccaaagcgacgcggacgactaaggaaataaatcttatttgtatgagtcaaatgataaattaatgcagttttatcaatatacacacaatcattattacgtaaatcctcaaaattctgtattccgataggatatcttctaaatgtctctttcataccactctaatgcttttattggaaatatgaacaaagatacgaaataaaatgattacatgacacttaatattattataaaaccctacaatatcattcaattgcattgttcgattcacataaacttatctaaagaactaccttattaatagccattaaaatagtgacgctatcccaccaatatagtgacggtatatgcttaggatagcgtcactatccaaggcaaataccgtcactatatttaaaccgaatatttcgggcttttaactctagtttccgcgctgtgtaggcaaggtaaattcctgcgaatcacaaatcattccattctcgtccgccactgcgacacggaatgtcacttcaccgtctttcaatttttcacctgcatgaatggaagcggtataacggatgccttcacccggaagaatttcctccaccatcacggaaggagaaatgccgagatgcttcaccttccccaccgtttctaccacaggaactacattataaacaggatttctcccttcattcataatctcaaagattatcttgctattttctcccgcatcaatcacatgactgcgattatcatctataaaacggatcttgcgcaacttcagttgagaaataggctgttgcacttgcggctgtttcttatacttttgcacacgcacttcccgtacttcaggaatatacgcatcttcctctatttgctcttgcctcggcgccgtcaacgcgtttccaatagccgcaccggcaatggttcccacaatattcccaatagcagaaccacggtaaccgcccctccagccatgattattatctccgataagtccgcctatcgaacttcccagactacctccgatagaagcacctgccatgatagctcccggatttcccatacgccccgacgcacatccactcacaatcaaagcggaaagcaaaattactgttagttgtttcttcatgagtctctctatttagtgttattatttattctaccactttaaaacgagcgaaacgtaataatagttgtttgtctcccgcatttttaaaatgaatagttgctttcgcattgtctcccgttccttctactttaatcacttcacccaatccgaaacgttcgtgctctatcatctgtccggcctgtactcctgctaccgatggcgaagtggaagaggttgcctgtgcaccgctacttgggctaacagtactaactttcttcaaattcctcggtacgctggaagcaatgatctgtgctttcggacgttcacgttgttcggaagatgtacttccgaaaggggcacgcgacggagaagctgaacgggtgaatcctccttcaatctctctacggaaacgtcctgcaccttcatcgacagcacggctcactcctgcctcatgcggcaattgcaagtaatgaacatcgatatcacgcaagaaacgactggggcttccaaattccatctttccataacggaaacgggttttggcaaaagacagataacaatgttcctccgcacgagtaatagctacatagaacaaacgacgttcttcttccagtgcccggggagaatctcctaccatcccactgggaaacaggttttcttccagaccgaccacaaatacattcttaaactccaatcctttagccgaatgaactgtcatcaacgttatcttttccccatcatccgccttgtcggaatcctgatcggtaagcaatgcaatctccgaaaggaaatcggtaagagacacattcggattaccctcctcctgccgcaaagcgcagaagtcattcattccattcaccaactcttctatattttccttacggcttagattctcgggggatgtgtcctgacaaacatcgttgataatgccggactgacggatgatattcgttcctatttcataagcgttcttatctgcctgatcgacaatgaaaccttctatcaattcacgaaagccttgcagttttgcatgcgttcctttatttatatccagtccgtaactcaatggttcacagagtgccgcccaaagacttacgccatgatcggtagccgccgatataatcttcccgactgtcgtatctccaataccacgagccggataattaatgattcgcttgaatgcttcttcatcattcggattcactaccaaacggaaataagcaatcacatcttttatctcttttcgctggtagaacgaaagtcctccgtaaatcttataaggtatactccgtttccgaagagcctcttcaaaaatacggctttgtgcattcgtacgatacaggatggcaaaatcagcatatccgtagcgatactcccgtcgtagctctgcaatcttattagctacaatatctccctcttccacatcgctatacgcctgaaatacgccgataggttcccccttttctttctccgaaaacacggctttccgtatctggcgttcattcttctcaatcaagctattggcagcacaaacaatggtttgtgtggaacgataattctgctccagtttaaaaactttcgtattggggtagatttttgtaaaatagagaatattgtcaatatccgccccacggaaagaatagatactttgcgcatcgtctcccactacacagacccgttgattttctttagtcagttgtagaacaatgctatgctgcgcataattcgtatcctgatactcgtccaccaatacataacggaactgatcgcgataacgtgccagcacttccggaaagtcacgaaacagaatataggtatataccaataaatcatcaaaatccatcgctcccgcctgacggcatctgtcccaataacgagtatagatatcacggatagcaggcatcttggcagccatatctccttcgtaagcctctttattggcagcgtatcccgtaggagtgaccaaatggtttttggcattggagatgcgtgcctgcactactcccggtttataagttttctcgtccaatcccatctctttgatgatggaacgaagcaggctcttactatcagccgtatcatagatggtgaactgggaagtgaacccgataaatgttgcttcggcacgaagaatccgtgagaagatggaatggaaagtccccatccacaaataacgtgccctttccatacctacctgacgggcaatacgctctttcatctcgcgcgccgccttattcgtaaaggtcagtgcaaggatattccacggattgtagccgttctcctgttccagcaagtaagcgattttataagtcaatacacgcgtcttccccgaacctgcaccggctatcaccagcgaaggaccgtcattataagtcactgcagcacactgactctcgttcaattcatctatataattggtattcataacagcattataaaaacaatgtggatttttaacaaacccttggcattcaaatttgttctcaatacaaaagtataatattcattcgagaatgaaggtatttttatgaattttcatcactaactattttaacctaacaccaaaaagcaatgaaaagaagtatatttttatcgattattttgagtttgtttctggtcgcctgcattccacaggcaatggcacaaaagcagagccgcctggaaaagctgctaaggtatctgaacgataatgacgccgacaaatggcagaaaaaccgtgataagatagatgacgagacacaaacctattatgccgaggaactggcattattggatgtgctcaacggattgtggaacgagcaaagcgaacaggctgccaccaactatttcggatgctacgaaagggcaacgaaagcttattttcccaatatctgtgaagaagagaaaatacaactttccaacgtacaaaacaaagcagaactggccgttatctccattctggatgcttcgaaagatcaaattccttttagcaagacgttgatggacagtatccagtcaagcggttatccgggagattctgccatcttgcaaaaggtacgggacatccgtgaaatggctttactggaaggtatgctgaaaacacctacgctgaatatttatcaaacgtacatcacggaatatccgaacggcaaatttatctctcaaatcaacactgcggaaaacaaacggctttaccagattgtaaagagtaatccgacatcagcgaatttcaaggcattttttgataacgccaacatgcagaaattcttcacggataaagacacgcgtccattccttccggaagttcgcgcgttatacgatgattttctgtttcaaggaatcgacagcctccgggagaaaggaaacgcaacagccatccggcagattattgacgagtataagcaatcaccttacctgacttccacagcacgtactcatctggacgaacttgaatatcttagtgaaaaagctgattttgagcttttaaaagctgccattgtcaattccgaatctttgagtatgctgcaggattttctttgcacacacaagtataaggaatttcgtgaccaggccaatgcactacggacaccgtttattctgcaaacaatcatatccactcctacttccgtgaaatactataatggaggacgattgattaagtctgcggaaaatgacagtacgggaaatacctcgaccacttattcgtatgatgataaggggcagctcatttctacattgtcgcttaccgtaaagaacggtcagccaagcaatgaaatacaaacgaacagattatacgatccgcaaggtcactgcatctttgaagtgcaaacgaatccgaaaaccaaaacggatctctaccgacggacacgccgtatcggtacggacggaagtatcgagagtgattcgctcaagtatacagatggaagagtcatcataagttcctataataaacaggggttattgaccgaaaccaaagagtataataagaatggagaacttcaggcgtacaccgcaaacaaatatgatgataaaggcagattgatttcatcccaacatcaaaacctgctttttgccaattcttcggatcagattatttcacaaaaagatgcttatgaatacgataaatacggttatctgacacaaatcgtttaccaacggattttaggcaataaccagaaaacatcgggatgcctgacctgcctgtacgataaatacggaaaccagatcgatagcaattcttattatgaatatgataatacgggccaatggatctgccggaccgaccgtgagcatccgaaagaagtggaacgcatacagtacatttacaaataaagtaagatgctgtgaacattttgcaaagggcttctgttattatagtataacaagccaattaaaacttgtaacattatgaatactatattaatgtctttaattatgatgaccatgacttacgaaatgcctaaacttccttacgctaacaatgcgttggaacctgtaatcagtcagcaaacaatagatttccattacggaaaacatctacaaacgtatgtaaataatctgaatagcctcgtgcccggaacagaatatgaaggtaaaacggtagaagaaatcgttgcagccgcaccggatggagctatattcaataacgccggacaagtattgaaccacaacctgtacttcctgcaatttgccccgaaaccttcaaagaaggagccggccggtaaactgggagaagccatcaaacgtgactttggcagctttgaaaacttcaagaaagaattcaatgcagcagcagtcggattgtttggttcaggatgggcttggctatccgtagataaagacggtaaactgaaaatcactaaagaggggaacggcagcaatccggtacgtgccggtttgaaaccacttcttggatttgacgtttgggaacactcctattatctggattaccagaaccgccgtgccgaccacgtaaacgccctgtgggatatcatcgactgggatgtggttgaaaaaagaatgtaatcaaatttacaagctaaactatacttatggaaaaggtcgttgtgtttttcacagcgaccttttttacagattaaaaagaaacagacttttattgtatatcagatgcattagttgtatttttgcaactcataaaacaacataacaaacaattatgatactgtataaaagaaaaaaaatacgatttattgtctccattgctgtactccttttcctcccccttttcggcaatgctgccaccacagaagaatctgaggaagaaatcctgtttatcacctcttataattctgacactaaatatacctacgataacatcagcacatttatagagacctacacccaattgggaggaagatattcgatcatggtagaaaatatgaatgcaacagacttaacgcaggcgcatcaatggaaaaaaacattgaccgatattctggacaaacatccgaaagccaaattagttattctcctgggtggtgaagcatggagcagtttcctccatctcgaagatgaaaagtacaagcagcttcctgttttctgtgcaatggcatcacgcaacggaatacgtattccggaggattcgaccgacatccgaagctataatcccgaaagcattaacttaatggaacgcatgaaggaatacaacgtaagatattgtagcacatacgaatatgacattaaaaaagatattgaaatgatacaggatttctatccggaaacagaacaccttgtatttgtatcggataacacatacaacggacttgccgaactggcatggttcaagaaaaacctgcaacatttcccacagttgtctatcacctacgtcgatggccgcatccatacactcgatatggctgccagtcaattgcgcaatcttcccagaaacacagtcatgttgcttggcatctggagaatcgataaccggggtattacttacatgaataactccgtttatgctttttccaaagccaatcctctcctgcctatgttcagcatgacttccactgcaataggttactgggctatcggaggatatgtcccgcaatatgaaggagtgggacaaagcatgggagaatatgcctaccgctttttagaccagaaggaaactgatatcagcagtatcaatatcttacccaacagatataaatttgatgcgaagaaactaaaggaatggggatttgaaaacaagaagttacctgttaactcaatggtaatcaatcagcccatcccattctttgtggcctataagacagaagtacaattcatcctgattatatttctcgtattagtaggaagtctaatgatttcgctgtattactattaccggactaaaatcctgaagaatcaccttgaaagaactacgaaacaactacgggaagataaaaagaagttggaagagtctgaaatcgaattgcgtgatgctaaagagcgcgccgaagaagctaaccaactgaaaagtgcctttgtttcgaatatgagccacgagatacggactccgctaaatgctattgtcggtttctccagtctgattatcggttcggtagagcagaataacgaactgaaagaatacgcagatattgtccagaccaactccaatctgttgctccaactgattagtgatgtactggatatatcacgcctggaatcaggaaaactgcaattcaactatgaatggtgtgagctggtgaaccattgccagaatatgattactctgaccaaccggaacaagacaatggatgtagacattaaactgcaaatgcctaaagagccttacatgctctacacagatcccttgcgcctgcagcagattattatcaatctgctgaacaatgccttgaaattcactcctgccggaggaagtattacgctggattatgaagtggacgaaaaaaagcaatgtatgctgttctcggtaactgataccggcaccggaatccccgaagataaacaggagctggtattccaacgtttcgaaaagctgaacgagttcgtacagggtacaggattgggactggctatctgcaaactgaccatccaatatatgggaggtgatatctggattgacaagaattacaaaaatggcgcccgatttatcttttctcatcctatcaaaaaacaggaatcaacagaaaaatgaaaaaaaatcgaatgatttagtgtttttctgtttctttttcacttactttgtccccgtaaagacaaaggggtgccccatgaggggctgagattataccctaggaacctgaggcagttagtactgacgtagggattgtgtttcttcttatcgcctttccattcaagcacgctctttgtatttactttcaacttatttattctgataggacaatgaaagtacaagtgaacaacaaagaggtggaaattactcccgactctacccttacacaactgacagcacagctcgaacttccggttcaaggcattgctatcgccgtaaacaacaaaatgattccccgtaccgaatgggagggtttcatattgcatgagaacgataacctggtgattatcaaagctgcttgcggaggataagggaatggtcagtctacaatttatcacgcatcagaccgaacggtactcgtacctcgaatcggcacgtatggcactcgaaggcgggtgcaaatggatccaactacgcatgaaagaggctcctctcgaagaagtggaggcagtagccctgcaactgaaaccgctttgtaaagagcacgaagcaatcctggttctggacgatcacgttgaactggcgcgaaagctggaagtggacggtgttcatctgggcaaaaaggatatgcctatcgaccaggcccgccaaattcttggagaggctttcattatcggcggcactgcaaatacattcgaagatgttgtacagcactatcgtgccggtgccgattatcttggcatcggtcctttccggtttactaccaccaaaaagaatttaagccctgtactgggattggaaggctattcctccatcctttcacagatgaaagaggcgaatatcgaaatccccgtagtagcgattggaggaatcacttatgaggatattcctgccatacttcacacaggagtaaacgggatagccctgtcgggaaccattctcggagcggataatccgatagaagaaacacgtagaatcctgaatcatgcgtaaagcaatgatgtacaatcagtaatttaatttataatatatatagaatggaaaagttagtaattgcgggacgcgaatttaactcccgtcttttcctgggaacaggaaaattcaattccaatgaagtaatggaacaagctattctggcttcaggcacggaaatggttactgttgccatgaaacgaatcgacatggacaacaaagaggatgacatgctgaaacatattattcatccgaatattcagctattgcccaatacttccggtgtacgtaatgcagaggaggctgtttttgcagcacaactggctcgcgaagcctttggaacaaactggctgaaactggaaattcacccggacccacgctatctgctccctgactctatcgagacactgaaagctacggaagaactggtaaaactgggttttatcgtgttgccttattgtcaggctgaccctgtactctgcaaacgtctggaagaagcgggcgcagctaccgttatgccgctcggtgcaccaatcggtaccaataaaggattgcagaccaaagaattcctgcaaatcattatcgaacaggcaggtatcccggtagtcgtagatgcgggtatcggtgcacccagtcatgctgccgaagcaatggaactgggagcttccgctgtattagttaataccgcaatagccgttgccggaaatccggtagaaatggcaaaagcattcaaagcggctacagaagccggaagacaggcttacgaagcaggattaggattacaagccgtcgacttcgtggcagaagcaagttcacctctaacggcttttcttgattaaaaacgaataaactatggaacaaaaaataaaattcccccgctcgcagaaagtctatttacccggtaaactttatccgaatatccgtgtagcgatgcggaaagtggaacaagtgcccagtgtcagctttgaaggcgaagaaaagatagcaacaccgaacccggagatatatgtatatgataccagcggaccgttcagcgatgcagatatgagcattgatcttaaaaaaggactgccccgtatgcgtgaagaatggattgtaggccgtggtgatgtggaacaacttcccgaaattacttcggaatacggacaaatgagaagggacgataaaagtctcgatcacttacgtttcgagcacatcgctctgccctatcgcgctaaaaaaggagaagcaatcactcaaatggcatacgccaaaagagggattatcacccctgaaatggaatatgtagcaatccgcgagaacatgaattgcgaggaattgggaattaagacccacattactccagaatttgtccgtcaggagattgcagaaggacgtgctgtattaccggccaatatcaaccacccagaagctgaaccgatgattatcggacgcaacttccttgtgaaaatcaatacgaatatcggaaattcggctactacctcaagcatagatgaagaagtggagaaagcattgtggagctgcaaatggggtggcgataccttgatggatctttccacaggagaaaatatccatgaaacacgcgaatggattatccgtaattgtcccgtacccgtcggcacggttcctatttatcaggcacttgaaaaggtgaacggcatagtggaagacctcacctgggaaatctaccgggatacattgattgaacaatgtgaacaaggtgtagattacttcaccattcatgcagggatccgccgccataatgttcatcttgccgataagcggttgtgcggtattgtcagccgtggaggaagcataatgagtaaatggtgtctcgtacacgatcaggaaagtttcttatacgatcactttgatgatatttgtgatatcctggcacaatatgatgtagccgtttctttaggcgacggacttcgtccgggttctatctacgatgcgaacgatgaagcgcagttcgccgaactggataccatgggagaattagtgcttcgtgcctgggataagaatgttcaggcatttattgaaggccccggacacgttccgatgcataaaatcaaagagaacatggaacgtcagattgaaaaatgccatgacgccccattctatacactcggcccgttggtgacggatattgctcccggatacgaccatatcacttctgctatcggtgccgcacaaatcggatggctgggtacggctatgctttgttatgtcactccgaaagaacaccttgccttacccgacaaagaggacgtacgcgtaggagtcattacctacaagatagccgctcatgccgctgacctggcaaaaggacacccgggtgcacaggtacgagacaacgcattgagtaaagctcgctatgagttccgctggaaagatcagttcgacctgtctctcgacccggagcgggcgcagacctattttcgtgcaggacatcatatcgatggagaatattgtacgatgtgcggacctaatttctgtgcaatgagattgtcacgcgatttaaagaaaagcgctaaaaccaacaaataatgagtagggagaaacagaaagtcagcccactgacctaccttctcccctcatttcaatttttaatttttaattgattaaaatgttctccgacgaattagaaaaaatatcctgggaagagacgacaaaagccatctattccaaaacagatgccgacgtacgccgtgcattgggtaaaaaagagcatctggatgtcaacgactttatggcgctgatttcacctgccgccactccttatctggaagtgatggcacgccttagtcagaaatatacgatggaacggttcggtaagactatctccatgttcgtaccgctctacctgactaattcatgtaccaactcctgcgtctattgcggtttccacatcagcaatccgatgaagagaacgatactgacagaggaagagattgtcaacgaatacaaagccatcaaacgactggctccttttgagaacctactgctcgtaaccggtgaaaaccctgccgcagcaggtgttccctacattgcccgggcgctggatttggcaaaaccttatttcagcaacctgcaaattgaagtaatgccccttaaagcagaagaatatcaggaactgactaatcatggtctgaatggagtgatctgttttcaagagacttaccataaagcaaattacaagacatatcatccgagaggcatgaagtctaaattcgaatggcgtgtagacggcttcgaccgtatgggacaggcaggtgtacataagattggcatgggtgtcctgatcggcttggaagaatggcggacagacgtaacgatgatggcttatcatctacgttatttgcaaaagcattactggaaaacgaaatacagcgtaaatttcccacgtatgcgcccgtctgaaaatggcggcttccaaccgaatgtagtcatgaacgaccgggaactggctcaacttacattcgcgatgcgaatcttcgaccacgacgtagatatctcctattccacccgtgaaagtgcagaaatccgaaatcacatggcaacgctcggtgttacaaccatgagtgcggagagtaaaactgaacccggaggatattacagttatcctcaaaccctggaacaatttcacgtaagtgatgagcgaaaggcggttgaagtggaacgtgacttgaagaaactaggtcgcgaaccagtttggaaagattgggatcagtcttttgattttaaaagataggcagatgcgatacgatagacaaatcatacttcccgaaatcggagaagaaggtcagaagaaactgcaggaagccaaagtgcttattgtaggtgtgggagggctaggctctcccatcgctctctacctggcaggcgccggtgtgggatgtctcggactggtagatgacgatttggtaagcatcactaacctgcaacgacaagttctctattccgaaaaagaattgggtaaaccgaaagctatctgtgcagcggaacggctctccgctctcaacagcgagatcagaatacatccctactctaccaggttgacaaaagaaaatgcttatcatatcattcaggaatatgatatagtagtcgacggctgtgacaactttgccacccgttacctgattaacgatatctgcatagagcagaaaaagccttacgtatatggtgctatctgcggttttgaaggacaggtttctgtattcaactacggaaaccagaaaaagaactaccgggatctttatcctgacgaagaagaaatgcaacggatgcctcctccgcctaaaggtgtgatgggagttactcctgccattgtaggaagtgttgaagctacggaagtgctgaaaataatctgtgattttggagatgttttagccggcgaactatggacaatcgacctgcggacatggcaatctaacaaattttcactataaaggttggtttctgacatagttaattagtaactttgctaagcaatccaattttaacaaaagaaatgaaactaattgtagttaccacccctaccttcttcgtcgaagaagataagattattaccgctcttttcgaagaggggctggatgtcctacatcttaggaagccggaaactccggctatgtattcggaacggctattgacacttattccggataaatatcaccgccgtatcgtcacgcatgaacatttctatttgaaagaagaatttaatctgatgggtatccacctgaatgcacgtaatcccaaagagccgcatgattattatggtcacatcagctgttcgtgccattcagtggaggaggtaaaaaacagaaagcatttttacgactatgtttttatgagtcctatttatgatagtatctctaaagtgaattactattcaacatatactgccgaagaattgcgtgaagcacaaagagccaaaattatcgattcgaaagtgatggcattgggaggtatcaatgaagataatttgctggagattaaagatttcggtttcggaggagctgtcgtattaggagatctttggaacaaattcgacgcctgtcaggatcagaactatttagccgtaatcgagcactttaaaaagttgaaaaagctatcagattaataaaaagccgatagtaaactgactgtacattcctattgtatatccaataaaggaaatgactttctcaatcataaaataaaaaagccgccgcgaattgtcttccgcaacggctttctgtatttcggtgttttcttatcagaacttatatcccacgataatagagaagttcatgtttttaggattaccaactttttccacatcaaccagaccaaattgaccatccaagcctgcaatgattctaccaaattccaatgcaactcctacaccaagacctgcatcaaaacgcttcaaagcatcatcaccaaaagtgtcgactttacgttctgtgtcattacctaagtcaaactttgttttaccggcaataccacaagcaaaataaggacctgcattcaccaccagattagtattatctgctacattgaaacgtgcagcagccattactggcaattccaaatacattgcattaatgctattgccatctttctttgcacctttactagttaagaataatgaaggttgcagtgaccatgtatcagtaaaagcatattcaaaacctccaccaagtttgaatccaacctttgcattcagatcaagatcaccggtgtaattactaaagttcatacctactttggcattccaacctgtaatttgagagaaacctgccactgaaatcagtgcaaataaaacaaacaaaacactcttcttcataattttaaagttttaaattaatactaaaggtttctattgacctcattgtttaacaatacaaatgtataattgtaatttgtattaaacaactttttcgttaacaagtgcgcaatttatagagattatacataaaaaaagggaattccctatttttgagaactccctttcctaatttgttgatttgttttcttcttattagaatgcgtaatggaaaccaattgaaagatcttcactagtaagttcaagaccaaaagaatctccaagcgtatttatatttctacgatatcccaggaaaccatacttggcaatgaaagagaagtgatcgttcaatttaacagcaatccccggtctaagtcccacttgtccggctttagtagtgtctccgtctttaaccttcacgaagccgagagcagcagttccgtccagaaacaggcgaaccgcaccggtttcacagtaagaccaacgaatgtatggagcaacaattactgaattctttgttagtccaccattataattatgtgaataatccaattcagcacccaatgcccatgtttcattaaagttgtatccaacttccggagcaactttaaaagaagtagtgttgcctgtgctgttacgccaaacgttcaaagatccgcctacgtaaatgtcttgtgcttttacagcgatagttgctaacattacaactaccaataataaaccctttttcattttctttgtttttttaaattaaacgttagaccccaattcggtcgatttctggggtgcaaatgtaaagctgtttttatgattaaacaaacatttagttagttttttataataaataccaaataaatattggatggtaaacggacatcagtacccaacaggcataaaataaaatagactgcaaatactttcacaagtatttacagtctatttatcagatagttaagtacctaaccagcgtatttgactatccttctattgctgcctgcgccgccgccaatctggcaatcggcactctgaatggagaacaactaacgtagttcaaacctacccggtgacagaatttcactgaagaaggctcaccaccatgttcaccacaaataccacatttcagatccggacggatagcacggcccttttctgtagccatacgtaccaactgtcccacaccattctgatcgagaacctggaacgggtctactttcaaaatcttcttttccagataaacaggaaggaaagaagctatatcatcacgagaataaccgaaggtcatctgcgttaagtcatttgtaccgaatgagaagaactcggcagaagaagcgatacggtcggcagtcaaagcggcacgcggaatttcaatcattgtacccactttgaagtcaatgctatctcctacttcctcaaacaacttcttagcttccgcacggattacattttcctgctccttgaattcatacaagataccagttaatggaaccatgatttccggatgagtttccactccttctttcttcaattcgagtgcagcacccaagatggcacgtgtctgcatctgtgtaatttcaggataagtatttcccagacggcaaccacggtgacccaacatcgggttatgctcacacaatgattctacacgttgctggatatattgcaggctcacacccatagtatctgccatttcctgctgtcccttcaaatcgtgaggaacgaactcatgcaaaggaggatcgagcaaacgaaccgttaccggacaaccagccattgctttaaagatacccttaaagtcttcttgttgatatggaagaatcttagccaatgctttacgacgtccttccgcattttccgccagaatcatttcacgcattgccttgatcttttcaccttcgaagaacatgtgttccgtacggcaaagcccaatacctactgcaccgaagttacgagccacttccgcatcatgaggagtatctgcattcgtacgtacctgcagacgagtatacttatcagccagcgtcattaattcagcaaagtcaccggaaagttctgcagcctgtgtttctaccttaccattataaactacacctgtacttccgttcagagagatataatcgccttctttcaacacaacaccgtcaatttctacggtacggtttttataatcgatattcaatgcacctgcacctgatacacaacatttacccataccacgagccacaacagcagcatgagaagtcataccgccacgagccgtaagaataccttcggcaactgccataccggccaagtcttccggagaagtttcgatacgaaccattaccacacgtttaccggcagcatgccattcagcagcgtcgtcagcaaagaacaccacctgaccggttgcagcacccggagaagccggaagaccacgagtcaacactttggctttcttcaaagcatccttatcgaatacagggtgaagcaattcatcgagtttattcggttccacgcgcatcaaagcagtcttttcgtcaatcatgccctgacggagcaaatccatagcgatcttcaccatagcagcacctgtacgcttaccgttacgtgtctgaaggaaccagagtttaccttcttgtacggtgaactccatgtcctgcatatctttataatgattttccagtttagtctggagagcatctaattctttatagatttccggcattgcctcttccatggaagggaacttcgctgcgcgaacatcttcggtcacaccagccaatacagcccaacgttgagaaccaatcttggtgatctgttgcggagtacggataccggccactacgtcttcaccttgtgcgttaatcagatattcaccattgaaaaggtcttcacccgtaccggcatcacgtgagaaacaaacaccagtagccgaagtttcacccatattaccgaacaccatagcctgtacattgacagctgtaccccattcatcaggtatactttccatcttacggtaaaggatagcgcgttcattcatccatgaatcaaatacggcacatatagctccccaaagttgttcgtatgcaccagtcgggaaatcttttccggtctgttcctttacggcagccttaaatttctttacgagttcctgcaagtcttccactttcaactcgttatccagttctacccctttcgctttcttcacctcttcaatgattgcttcgaacgggtcgatatcatctttattggtaggcttcatgcccaatactacgtcaccgtacatctgcacaaaacgacgataagagtcccatgcaaagcgtgcattacctgtcttacggataataccttctaccacttcgtcattcaatcccaagttcagaatcgtatccatcatacccggcatagatgcgcgcgcaccggaacgtacagacaccaacaaaggattttcaacgtcaccgaatttagatttcatcaacgtttccacgtgagtgatcgcttttaccacttcatctttcagtagctcaaccactttatcacgtcctaacgtattgtattccgtacaaacatctgtagttattgtgaatccgggagggacaggaattccgattaaattcatttctgcaaggttggctcccttaccaccgagcaaattcttcatgtcagcctttccttctgcctgaccattaccaaaggtataaactctttttttatccataatattgtgtttaaagttacattatgatttttttctgttcgcaaatctaaggatatttcgcaaacttgaaaactttttgcgaaaaaactttctatcaaaatgcaatttcgacattacaatccggaatatttctgtatacccgaattttttccaaaaaaaatacctacttttgcaaagtaattattagactggtgtaaaagtggcaagaaagaaaaaagagcttcccttattggagaaggtaacaatcatggatgtggctgccgaaggaaaagccatcgcaaaagtaaacgacctggtgatttttgttccctatgtagtgccgggtgatgtcgtagacctgcaaatcaagcgtaaaaagaataaatatgccgaagctgaagcggtgaagtttcacgagctgtcgcccaatcgcgctgttcctttctgccaacactatggcgtatgcggtggctgcaagtggcaagtgctcccctattcggagcagatcagatataagcaaaagcaagtggaagataatttgagacgtatcgggaaaatcgaacttcccgaaatttctccgattctcggttctgacaagacggaattctacaggaacaaactggaattcaccttctcaaataaacgctggttgacaaacgaagaagttcgtcaggatgtgaagtatgaccagatgaatgcggtgggtttccacattccgggagcctttgacaaggtgctggctattgagaaatgctggttacaggatgatatatccaaccgtatccgcaacgctgtacgtgactacgcttacgaacacgattactctttcatcaatctgcgcacacaggaaggtatgctgcggaatatgattgtacgcacctcttcaactggcgaactgatggtaatcgtcatttgcaagattacggaagatcacgaaatggaactgttcaagcagttactccaattcgtagcggactctttcccagaaatcacttctcttctatacattattaataataagtgcaatgacacaatcaatgatttggatgtgcatgtatttaaagggaaagatcacatctttgaagaaatggagggactgcgtttcaaagtaggaccgaaatcattctatcagaccaactcggaacaggcttataatttatataaagtggcccgtgaatttgccggattaacaggcaacgaactggtatatgacctctatacaggaacgggaacaatcgccaacttcgtatcacgccaggctcgccaggtaatcggtatcgaatatgtgccggaagctatcgaagacgcaaaggtaaatgcagaaatcaatgatatcaagaatgcattgttttatgccggtgatatgaaggatatactgacgcaggatttcatcaatcagcatggacgcccggatgtaatcattactgatcctcctcgtgccggtatgcaccaggatgtagttgatgtcatcttgtttgccgaaccgaaacggattgtgtatgtaagttgtaatcctgctactcaagcacgggatttgcaattactcgatgagaaatacaaggtgaaagccattcaaccggtagatatgttccctcacacccaccacgtagaaaatgtggtgttgctggaacttcgataatccgtgatgataatagaatttcaaaagaaaaaagaaatgggaaaaagacctagaagaactcctgctgaaaaagcacgtgctcaatataccaattatgcagtgaaagaacccatggaactaatggagttcctggctaccaagatgccggacgcaagtcgtacgaaattaaaatcgttgttaagcaaacgggttgtatttgttgataatgtgataaccacacaattcaactttcctcttgaagcgggcatgaaagtgcaaatcagcaaacaaaagggaaaaaaagaatttaataacagactgctgaaaatcgtatatgaggatgcctatatcattgttgtcgagaagatgcagggacttttatcagtcaatacagaaagacagaaagagcgcacagcctatacaatacttaacgaatacgtgcaacgttccggacgtcaattccgtgtgtttatcgttcatcgcctggacagggacacttccggcctgatgatgtttgctaaagacgaaaaaacacagcggacactacgtgataactggcacgatatcgtgactgaccgtcgatatgtagctgtggtggagggaagtatggaaaaagattatgatacagtcgtttcctggctgactgataaaacgctttatgtaagttccagtgaatatgatgacggtggatcaaaatctattacccactataagaccatcaaacgtgccaacggatattctctgttggaactcgatttggaaaccggccgaaagaatcagattcgtgtacacatgcaagatttaggacatcctattatcggtgatggaagatatggaagagaagatgctcccaaccctatcggacgactggcactccatgctttcaaactttgtttctatcatccggtaacgggagatttgatggagttcgagacaccttatccggcggagtttaagaagttgtttctgaaaaaataaattcctatattcaaaaataaagccagaatcataatcgactctggctttatttttaatcttcattattattttattgacgcctcatataaaatggctgtccatctattctatctctaaaatcctgccaattattataccatgttccactaaatgtcctgccggtagcttctccaccccaaatataggcataagtgcggtcaccgtagaaaaataattccattgaattatatcctccatcaatccatctccactcaaaaaccagataatttggatcaccagcagaaccaatcgttccttgatttctcgcattaaatgtcatgagcgtacctcttccccaggtatatgccccgaaatcaatttcttcattagtataccactcgccaggcagattaaattctgtctcttcttcactctcacacgaagtaaagccaaccaataaagtcagcatcatcaagatacctgcatatctctttatcattttcataattctctagtttattgcgtttattaatacaaaattagcattttatatttactatacatcacaagccacaagttttttgtacctttgcaaagataatattaaattttccacatgaaacttctttggcttgatttaaatagttcgtacgctcattcttcgctggcattgccagccttacatgcccagatagcaaataatacagacattgaatggtgtacggtctccgccactatcaatgaaaataccggtagtgtcgtcaatcaaatctaccgccatcaaccggatatcattgcagctaccaactggctatttaatcacgagcaactcctgcacatcgtttcacgcgcaaaagcgttactacctcactgctgtgttatactcggaggtcccgagtttttaggagataatgaagctttcttatataagaacaaatttgtaagcggagtgtttcgcggagaaggcgaagaagtatttcctttatggttaaaagtgtggaatcagccaagaaaagaatggaaatcaatcacaggactctgctatctggatgaatcggaagcataccatgacaacgggctcgcccgtgtcatgaacttttccgaattagtccctcctgaagagagccgtttcttcaattggagcaaaccctttgtgcaattagaaactacccgcggatgttttaacacctgtgccttttgtgtcagtggaggtgaaaaaccggttcgcaccctatctcttgaagcaacccggaaacgtcttgacgtgatacaccaacacggaatcaagaatgtacgggtactggaccgcactttcaattacaacaacaaacgggcaaaagaattactaaatctattccgcgaatacccggatatctgttttcatctggaaattcatcctgcactcctttccgatgaactcaaacaggaattagccacccttcctaaaagactgctacacctggaagccggaatccaaagccttcgggaaaacgtgcttgaacaaagccggagaataggcaaactctccgatgctttggccggactcaagtatctatgttcccttgaaaacatggaaacccatgccgacttaatagcagggctcccactctaccatctatcagaaattttcgatgatgtccgtactttagcagagtatggcgcaggagaaattcaactggaatccctcaaattacttccgggcaccgaaatgaaaagaagagcggacgaattaggcatacagtactctccactccctccatacgaagttcttcaaactcgtgaaatcaccgtagatgaattacagacagcacattatctgtcccgcctgttagacggtttctacaataccccaacttggcgaagcatcacacggatactcattctcgaaaaccctcattttatacatgagttactcgatcatttagttcaaacagatgtgattgacacccctcttagcctggaaaaaagaggattaatcctctatgacttctgcaagaatcattatcccgactacctgacacaagtcagcattgcatggatagaagcgggtatgtcattaaaaaaagctccggcagaaaaagtaagaaccaaaagacagctaccacctgaaagctgggaaatagaatacggagcatatcgcgagaatctacgattatgtttccttcccaccgatgaagaaggacatggttactggtttggttttgagtcggagattcagaagatacaaccggttttcaaggctaaaaaactatcataaataaaagaaaagtattctcatattatgtgaaattattattagtcgctaatcgtttagagcagcatttcctgttttccaccgtccatacaataaactttactagcacagtgtatggacattcgaaaatatcaattcaatattttttgcctattattgttccccttatccgcaacaggacaagaatggaacaaacaggattcattgagacttcagcaaatgctggaatccgatcaggagatcaagataaatagaaagtttatcgaaaaagtagagcaaaacatgtactctcgaaaaccatttgtagattttgatcccacactaccgactttaaaatcttccatgattttttcgaaaccttccattcgcacttatcagacattcctaaaaccgggttccacctttttacccacttactcctggttaagaataaacaagaatcttgtgctgcacagtaaaagtaattttgcagaaaattccagttgctttcatatccaaagccaaatagaatataatttatctcccaaatggtctctcaacatatatggcgtacaaaaccttgatacccgaaaacaccggggcctcccttccgaagtggaacccacccaattgggtagtaatgttgttctcaaaataaataaaaactggaaaataaaaacaggggtacaataccaatacaatgtcctccgcaaaagatgggaatggatacctcaaattagtgtttcatacgaatggtaacccgtgccgacaatcaggaatcgaaaagttttagaaaacaagaaagcatattttccatttattctcgtacctttgtcatacgattaaatatgctatcataatgaagaactttatcaagggattccggtttaccccctctaattatccggcagaagtagaagcaaaaatacagaaatacagaaagcaaggttataaacttccaccgcgcaaagtactccgtactcccgagcaactggaaggtatccgggaaagtgccaagatcaatactgcactgctggactatatttcagagaatatccgggaaggcatgtccaccgaagaaattgatgtgctagtgtatgatttcaccaccagtcacggtgccatccctgccccactcaactacgaaggatttcccaaaagtgtttgcaccagcatcaacgatgtagtgtgtcacggaatacccaataaaaatgagattctgaaaagcggagatattatcaatgtagatgtttccaccatttacaaaggatatttttccgatgcatcccgtatgtttatgattggagacgtcaaccttgatatgcaaaagttagtacaggtaaccaaagaatgtatggaaataggaattgctgccgcacaaccctggaaacagctgggtgatgtaggcgccgccatccaggaacatgcagaaaagaacggattcagcgtagtccgtgatctctgcggacatggcgtagggatgcaattccatgaggaaccggacgtagaacatttcggacgccggggcacaggcatgatgatcgtgccgggcatgaccttcaccatcgaacccatgattaatatgggaacctacgaagtgtttgtagacgatgccgacggatggaccgtctgcaccgacgatggactgccttccgcccaatgggaaaatatgattctgattactgaaaccggaaacgaaattctgacatattaatggaactgattctacttattgttattgccgtgttaatgatagtcctacttgtattatcactaaccaaaggcaacaatcaaactcaagcagaacaattacaaatagccttgcgtcagcaaatgcaggaaaaccgggaagaactgaaccgcagcatccgggaacttcgcatggaaatgacgcaaacgctgaaccagaatatgcaacagctccaagatgttctgcacaagaatatgatgactaccggagaactgcaacgacagaaattcgacatgatggcccgccagcaggaagcattactgaaatccaccgagaaacgactggatgacatgcgcctgatggtggaagaaaagctccagaaaaccctgaatgaacgtatcggtcaatcattcgaaatcgtccgttcgcaacttgagaacgtgcaaaaaggactgggagaaatgaaatctcttgctcaagatgtcggcggactaaaaaaggtattgagcaacgtaaagatgagaggaacgttcggcgaagtccaactgggtgcactcttagaacaaatgatgagccccgaacagtacgacgccaatgtcaaaaccaaaaagagcggaaccgaatttgtagaatttgccatcaaacttccgggaaaagatgacgccaacagcaccgtctacctccccatcgacgccaaatttccgaaagatgtatacgaacaatattacgatgcattcgaagcgggagacgcagcattgatggaatcgtccggcaaacaattggaaaatacaatcaaaaagatggcaaaagacatccatgataagtatgtggacccgccttttaccacagattttgccatcatgttcctcccgtttgaaagcatatatgccgaagtaatccgacgcaccagtctcatcgaaacactccaaaaggagtataagattgtagttacaggtccgacaacattaggcgccatcctcaacagtctccagatgggattccgcacacttgctatccaaaaacgtaccggagaagtctggaccgtattgggagctgtcaaaacagaattcagtaaattcggagggttacttgaaaaagtacaaaagaacttgcaaagcgccggtgaccaactcgaagaagtcatgggaaaacgaacacgtgccatcgaacgcaaactgcggcaagtggaacagttgccacacgaagaaagccaaaagattctacctattgacgtagaagacgatttgacagattactaactgatattatttaggcacggattacacgataaacacggaaagaaaataaacttatccgtgcaattcgtataatccgtgcctaaaaaaattagagaaagtgtttcgacacacctccacactaaacagaaaatgctctacaacatttccatatcacgtcaatccgcataactccgcaaagccaaattcttcacccaaagaacgaagatacccgtcagaatcagattcaataccagagtaagcactgaaataaccaatgccgggccacccaagttatatcccaatgcaatgaaaatgattccggcccctacctcaccacgggtaaacataccgatggaaagagccagtcgctcacttaatttccggtcacgataaaagaacatcggacaaagctttcctatattcgacaataaagagacaatcaccacatgaaacataatcattccccacgacatcatctcctgcgaaccagtcacggaataagaaccagcatgagtctccgcaaagttcactccgataaaatgcggcatactcattcccaccaggaacatgaagaaaaatgaaatcccggtagacacctttcgttccacaggtgtgtcatgttccttatgtttcataatcatacccagaacaaatgccggcaacaggacttcaatatgaatacttccctcgtccccatacaattctttactccccagatacagtatttgagtagccagaaatataatcattgaataaaagaggatagccttccagtcctgacgccaatcatacttattcaatctttgccagccgatcgacaataacaagaacacaatcaccaccacaataatcaactgccagcgcagcccaatcatcataatctgaagaggaatcattaaaagaatcgtatccaagtcatcgaaaattgccaatacctgtattttcttataaatccaactggacttcagtccgatagccgccaacatcgtaaacagaataccggctgatgtaggtgcagcaaaacggcttaacaataaattctccttccatgcttcccaactattccaaaaatcgggaggaagcaatacaaacacataataaatagcaatcataaaccatggtaaagcagccgtagccatggctataaaataatcttgagcgtaacttttccaccgtgttttatcaaggacgaactcacggcctacattaatcattataaaactaagacatacatagagtagtacattcgatatggatttaacagctccatacccatctcctgccatcatcggcaggaattgcgaaaccacgagccccaacatcaggaagcccgaaaaagacagaacttttctcatatttatagttgtttgttgctaaaaagtaattgccaaggaaagctctgcagacagaaggcaatcacctggtgtattaaaaactaaccgcaagtcaatttgttcagaacagatctctgaaaaattgcttgcggcagtatttttaatccagcttcagtacggcgaggaaggctttttgcggcacttccacgttaccgatttgtttcattcgttttttaccttttttctgcttttcaagcagtttacgtttacggctcacgtcaccaccataacacttcgctgtcacatccttacgaacagccttaatcgtttcacgggaaataatcttagccccgatagctgcctgaatggcaatatcaaactgctgccgcggaataagctctttcagtttctcacacatccggcgtcccatatcgtaagcattgtcaatatgtgtcaaagtagaaagtgcatccacaggctcaccgttcaacaaaatatccagcttcaccagcttcgaagtacggaaaccattcggatgataatcaaacgacgcataccctttagaaatactcttcaacttatcataaaagtcaatcacaatttctcccaaaggcatattgtaatagatttccacccggttaccggagatatattcctgtttaatcaattcaccacgcttacccagacaaagcgtcataataggaccgatataatcagtcgttgtaataatagatgctttgatatacggttcctcgatatggtcaatcatcgtcgggtcaggcataccaccggggttgtgcacctccttcatattgccctgcttatcatatatatggtaggacacgttcggtaccgtagtaatcacattcatgtcaaactcacggtccagacgctcctgcacaatctccatgtggagcaatccgaggaaaccacaacggaaaccaaaacccaaagccaatgaagactccggttggaaagtcaacgacgcatcattcagctgcaacttttccaaagacgcgcgaagatcttcaaaatcttccgcctcaatcgggtacactccggcaaacaccatcggcttcacctcctcaaacccggcaatagccttgtcacacggacgggcaatatgtgtaatggtatctcccaccttcacctctttggaagttttgataccggaaattatatatcctacatcccccgtacgaagttcgttacgaggcaccatatccattttcaacacccctatttcatcggcatcatactcttttcccgtattgaaaaacttcaccttgtcgcccttgcgaatcgtgccgttttcaatcttgaaataagctataattccacggaaagagttgaatacagagtcgaaaatcaaagcctgcaacggcgcctcttcattcccttcgggatgaggaatacgttcaatcacagcagccagtatctcttccactcccatacccgttttaccggatgcacgaattacctcctcgcgcttgcaacccaacagttcaacgatttcgtcctccacttcttcgggattggcgctcgccatatcgcatttattgataaccggaataatctcaaggtcgtgttcaatggccatatacagattcgagatcgtctgcgcctgcactccctgcgaagcatcgacaatcagcaatgccccttcacatgcagcgatagaacgtgacacctcatacgaaaagtccacgtgtcccggagtatcaatcaggttaaggacatacttctccccctgataagtatattccatctggatcgcatggctcttgatagtgatccctctttctttttccagatccatattatcaagcatctgccctgaagtcacctgaatggtgttagtaaactccaacagacggtcggccaacgttgacttaccgtggtcaatatgagcaataatgcaaaagttgcgaatattcttcattctgaattcttattattttatctttttggtgtgcaaagatacgtaaatggcggaataaaaaaaaatgcgttgataacattatgatcatgtaccaacgcatttttttattgcttaagtgagttactcgcttagatcaatttgatgaagagttcaccttcaacttcttccacagagactttgtcttctctcaataaccagccaaggccgaggaacagatctttgtcaaccaatttagttgcttttttaagctgcttggcagtcattccttctgtttcgttcagtgcattccagatagtacctgcaattacaccagctttttctttcaacatttgctttgcaattttagttagacatgcttaaaatcatccggtcaaaaagactttcagattttatttcggggacaaagatagttatttttatgttatataacactttattgagcacttttttatcgtttttgtaataaaaaagcattttttctttcatttaggatgcttttcgagatattcagaccaaattcttgccgcttcttccaccattttagcgcaaggacgcttgctataatattgagcagtacgctcttccggaatcgttgaaacgggatcttttttctttaatcccaacaattcgccacaaatcagcgagccgttacgcttcttaaattcagccgccagttcttgcaccaccgcataattggcagcttttccttcccggtctgtcgcttccgtagcgccggtttccaagcccgccaccaaaaacatgccgcaggcagctccacacgtttcacgcattcgtcctatccccccgccaaaggaagcacccatacgcaacgcctgttcctgtgtaaatccatacatatccgcaaaggccgctactaccgactgtgagcagttgtatccgctcttaaaaagctccactgctttctgtattctatcttccataaactattttgcatttttatttcgcacaaaaatataaaaaagtatctttgcatcagatagggcgtaaagattaaaatcaaaaaaaagaaaatatgaacaaaactatttcatataaagaatcgacagccattgccatccaagctatgataagcgcagccagaaaggatgaatatgctgacaggaaaagaaaaagtggttttccccaaaacagaaagaaacgtgatgtcactctcaaagatgtacgtgaatggaacaagagaagaaattataaagaggatgcaggaattgccgtcaatgcaatgatggcgtcagctatcaacgacccctatgtggacctgaatccaccctccaaattctaagagataaaacaatggctacaacattcgatattcaactccctcattactcgcgtggatttcatttaatcacgcgtgatatcatttcacaactaccagcacttcccgaaagtggcctgctggtagtctttatcaaacacacctctgccggactaactatcaacgaaaatgcagacccggacgtacggcatgacttccagacattctttaataaactggttcccgacggtgccccctatttcatccataccctcgaaggccccgacgatatgagcgcccatataaaagcctccctgataggaagctcggtcactatccccatcaagaatcaccgcctgaacctgggaacatggcaaggtgtctacctctgcgaatttcgcgacggaggagacacccgtaaattgagtattactatcctataatatttccaacgccatcggacaatgatcggaatgtacggcctcattcaggatatacgcacgtttcaacagcgggcgtaccggctcactaaccatgcaatagtcaattctccaacccttatttttggcacgcgaattaaaacgatagctccaccaggtatattcctgtttttcgggacaaagcgtacggaaagaatccacataccccgcagacaggaaacgtgtcatccactcccgttcttcaggaaggaaaccactgtttgttgcattccggacaggatcatgaatgtcgatcggctcatggcagatattataatcaccacaaagaatcaaattgggacgggacttctgcaactccatcacatacttttgaaaatcttccagccacaccattttaaaagcctggcgttcgtccccgctcgttcccgaagggtgataaacactgactaccgataagtctccgaaatccgcccggataaaacgtccttcattatcataagcctccattcccatcccatattccacatggtccggttcctgcttggtaagtatggccactccactgtatcctttcttctgcgccgaatacaaataagacttgtaacccaacgcttcaaacacctctcccggatactggtccggttgcagtttcgtttcttgcagacaaagaatatcaggattctcctgcgccagccattccggcaaacctttagatacggcggcacgtagtccgttcacattataagtaataatcttcatcgatctatatgtattgatttatattcattttatgaaaacaaaagcatgatattcagtaccgaaacaataatggcaatcgaatacaacacaaacgtgctccaacgactattgacataatctcccatcacctttcgggaagacgtcagtcccacctgcaaaaataccgtgaaaggtaattgaatactaagtatcatctgcgaaataatcaatcctttgaaaggatctccaataaagaaaatcagcaataaggcaattcccagagataaaaggactcctacctgcgaatggctgtctttgatatgatacgattcaccgaaaatacccgcaaagatggaacctgccgccattccgctcgtaatggtggatgaaatacccgccatcagcaatgccagtgcaaatacgatggcagcattacttcccaacaaaggttcgagcaatgacttagcctgttgcagttcctctacctgaataccgcttttaaagaaagtagcggcagccagaagaatcatggcactgttaatcgcccagccgacaatcatagagaaaagagtatcaaacaactcatatttcaaaaccttcttaatagaagcatcatctttcttattatattcgtgactctgaatcacctccgaatgaagaaacagattatgaggcatcactaccgctcccaacacactcatgataatcagcatacttcctttcggaaaagaaggagtcacccaccctgctgtcgcagccggccagtctatttccaccagaaacagttcgtagataaacgaaagcccgataacagagacaaatgcaatgatggaacgctctatctttttatacgaattagtgaaaagcatgatagagacaaaaagcgtagtcaacacagctccccatataataggaatatcaaagagcatttccaacgcaatggcacctcccagaatttccgctaaagaagtagaaatcgacgccaataccgccgtaccaagaataggtcgcgacacccatttgggagtgtatttagtggccgcctccgaaaggcaaagtccggtaacaatccccaggtgggcaacgttgtgctgaagcacaatcagcataatagtagacaatgtaaccacccaaagtaaggaatagccaaattcggaaccggcggcgaagttagaagcccagtttcccggatcaataaatcctaccgtaaccagaagccccggaccaatatatttaaaaacatccagtccacccagatagcgtttatgatctttgcgttttaagtcttgaaaaatattcttcatttttgcataatagttttaaccttacaaatatacttataaataacgagtgaaggtcaattttagttcaaaataccgacaagtaagtaaacaacacccggatccccccctatggattcccacaaaaaaaagaccctcgacaaaataaattgccgaaggtcttgaaaaatatcaaattttacaaaaataaaagaagtcgattaatatcccatctcatgtaatgcacgacacaattggtcaggacatgaagtcggtctgccaccacaatgcactccttcaagttttgcgataacatccgctaccttcattcctctcacaaggcgggaaataccttgaaggttaccattacatcctccccagaaagcaacttctttcaccactccatcttccacattcagttcgatgttggtgctgcaagttccctgggttctatacacatattccataaccttgtcttattctccctcttccggctgcatattggtataaacagtctgcacgtcgtcaaattcttccaaacgttcgatcatcttatccaatgtttcgcgctgttccggagtcacctctttcatgtcgttcgggatataagtgaagtctccaccgacatcttcaaagccacactcctccaggtgtttctgaatagcggcatagctcttgggattaccatagatagtgattgttccttcttcatcatcctcttcgtattcatcttccacatcataatcgatcagatccagaatcagttcttccatatccaatccgtctttcttcttgaaagtgaatacacatttgtggtcgaacaggaacgcgagagatcccattgtaccgagattaccgccaaacttattaaataccgaacgaacgtcagccaccgtacgggttgtgttatctgtcagcgtatccacaaatacagcaataccgtgaggaccgtatccttcgtaagtcatgctcttgtagtcgctctggtctttacccattgcgtttttgatagcacgttcaatattatccttcggcatattttcacgcttacaagtagcgatcaccgaacgcaaagtcgggttattttcaggttccggaccgcctgcctttacagctatcgcgatttgtttacccagtcttgtaaatgttttagccatgtggccccatcttttcagtttagcggcctttctatattcaaatgctcttcccattggtttatatttttagattgaaattttaagtttatctaagtttggcacccagcttatcttccaagttcttcaccagtttcgacatgatcttatcaatcatcttatcattcaaagtctggctctcatcctgaagcaggaagctcactgcatacgacttcttgcctgcttccagatttttaccttcgtacacatcgaagagttccacttctttcagcagcttcttctctgtttcgtaagcaatcttttcaatttcggcaaactgcacattcttgtcaagcaacaatgccaggtcacgtttcacagcagggaacttggagatttccttgtagctgatcttcacagaacggatagccttcatcagttccttccagttcaagtcggcaaaatacacttcattgtcaatatcaaatgctttcaacagcttcttagtcacgataccgaaggaagcaagacgcttaccacccttcgtattgatagaaagtgcggcagcaaaaatatcgtccgtcagattaccgacaaccagattgtgcaaatccagtcccagacgcttcaatatattttctacataagccttcaattcatataccgaactgttctcatctgcatgtgcccatgaattggaaaccttcttaccggttacccacaagcccaggtgataatcttccgaataaggagccagtaccttctcttcgttcttcttgtcagcattgaaataataacagttaccgaattcgaagaatttcaaatcagcgttcttacgattggcgttatgagcaatgctttccagtccgccgaacagcaaggtctgacgcatagcgttcaaatcagcactcaacggattgagcaacatcaccaggtgattggacggataagcctccaacccatcataataagcagcacgagtcagtgagttgttcagaatttcattgaatccacaacccaccagttgttctgcaatcagactctgcaatttattcgacttgtcgtgttcaccctttgtagtcagactggagttcagcgtagtcggaatttccacattattatatccatagatgcgaagaatatcttcaatcacatcgcaatcacgctgcacgtctacacgataaggaggaacagccaatgtcagtccttctgccgtttcattggtaatcttcatttccaagctagtcacaatgctcttgattgtctctaccgggatcactttacctaccaaagaatgtactttttcgtaagcaagatcgacgataaaatcctgtgcaggagtagtgaatacatcttttatttcagaagaaatcgtaccgccagccagttctttcaccatcaaagcagccagtttcaagcaataaatcacaccgttcggatcgataccacgttcgaaacggaaagaagcatccgtattcaagccatgacgacgagccgtcttacgcacccatgtaggatggaaataagcactttcgatgaatacgtctgtcgtagcttccgtagagccggagtccagtccgccgaatacgccggcaatacacatggcctcttccttgttgcaaatcatcaggtcgcgttcgttcaacttacgctccacttcatccaacgtaacgaacggagtaccttcgggcattgtcttcacaatcacttcattgcctttaatctttccggcatcgaagcaatgcaacggctgaccgaaagcatgaacgatatagttcgtaatatccactacattattaataggacgcacaccgatcaggcgcaatttgttttgcagccattccggactctccttcaccgttacacctttcacggtaacaccggcataatgcggacaagcttcgctgttttcaaccttcacttcgatattcaagtcatggttttccactttaaagccatccactgacgggcgttgtaaagttgcctgacgaccgttctgaatcagataagcatacaggtcacgagctaccccatagtgagagcaggcatccgcacggttaggcgtgatatccacttccagtacataatcgctcttgatattataataatccttggcaagcgtacccggaacagcattttccggcaatacgataatacctgcatgatccgtaccgataccgatttcgtcttcggcacaaatcataccagtagattccaccccacggatttttgatttcttgatggtaaaacattcgtcaccatcataaagttttgtacctaaagtagctaccaccactttctgtccggcagccacattcggggcaccacaaacaatctgtaccggttcaccgtctcccagattgacagtagtaatatgcaaatggtcagaattaggatgttccgtgcaggtcagcacttcaccgatcaccagtccttccaaaccacctttaatggtttgcacttcttctacaccacctgtttccaagccaatagacgtcaacgcagcagccgtttcatcgggcgtcaggtcgaaattgacatactctttcagccagttataagagatattcatatatttaattttttattgtttctcaaaaagatttgcaaagttaataagatttttcggttgaccgagaaggttagataaaaaattgcgcgttatttcaccacagggacgcaactagaacggcaaaggtccatcccccggtgctccgaacggattcgctgtctgcggtgcaaaatcaggcgcgggagaaggaggtacggaacctgcattacctgtattcattttcgatcctaacatagccccggcaggctcacccggcatcgggataaccatatcgtcctccggattggagaaacgggtaaattctcccttaaaccggagcaacacctcgcctaccgcaccattacgatgcttggcgatgacaatctccgccataccacgcaggtcattaccacgatcatcctgataaatcttatagtattccggacgatggataaagcacaccatatcggcatcctgctcgatggctcccgattcacgaaggtcactcaactgcggacgtttaccatcaataccttcacgactttccacaccacgattcaactgcgacagtgcgataatcggaatattcaactctttcgccagtcctttcaacgaacgggaaatggtactaacctcttcctgacggctaccaaatgccataccgctcgcattcatcaactgaaggtagtcaataataatgattctcactccatgttcacgtaccagacgacgcgctttcgttcgaagttcaaatacagacagagacggagtatcatccacgtaaagcggtgcatccatcagattcttcagtttatagtccaactgttgccactcataaccagccaactgtccgctcttgatctttccactttcaatttcgcagacattggaaatcaaacggttcaccaactgaacgttactcatttcaagagagaacaacgccaccgggttccgataatcgacagcaatattcttagccatagaaagaacaaaggcggtcttacccatcgcaggacgtgcagcgataatgataaggtcggaattctgccaaccggaagtcatcttatcgagctttgtaaaaccactctcaagaccactcaaaccgtcggttcgcgccgcagccttctgaatcagcttataggcttcgtcaatcaccggattgatctgcgtataatcctttttcatgttctgctgcgaaatctcaaaaagtttaccttccgcttcctgcatcaagtcgtccacatccagcgtttcatcgaacgccttactctggatattgcttgtaaatgtaatcagctcacgcgccagagatttctgtgcaataatacgggcgtgatactcaatatgcgctgatgaagccaccttactactcaattgagtaatatagaacgggcctcccacctcttccaattctccacgtttgctaagttgttcctttacagtcagaatatccaccggcttctgattcaccgcaagatcggtgatagcagaataaatcaactgatgccggcgttcgtaaaaagattcgggacgaagaatctcactcaccaatgagtaagcgtctttttcaatcatcaaagctcccaaaactgcttcttccagttcaggcgcctgcggctgaatacgtccataatcatttaccggttgtattttagtagactttgaattgcgggtatttcttttctgttcggccatcgaggtatttactattttacaatttactatttactattttgcgaccggacaaactcctttataacagagtttttccagtcgggacgacaaagatagaatataatcatgaagaatggataaggaaaaatgaagattttactaactttgctcccgaattacattcaacacatgattaattgtcatgtgcggcactgcaaatagtaaatcgtaaattgtaaaatagtaaataaccttatgctcgcttttcctaatatcaaaataaacctgggactttccatcacggaaaaacgcccggacggatatcacaatctggaaaccgttttctatccggtagccctcgaagacgctctcgaaatccgtacttcttctgaaacagaaaagaagattatcctccaccagtatggcatggagatagccggcaatccggaagacaacctggtggcaaaggcctattcattgctggataaggagtttcatcttccccctgtcgaaattcatttatataagcatattccctcgggagccggactggggggcggttcatccgatgccgcttttatgctaaagttgctcaacgatcattatcagctgggagtatccgaagaacaattggaagtatacgctgccactttgggagcagactgcgctttctttatcaaaaacagaccgatatttgccgagggaattggaaacatcttctccccggtcgaactttcattaaacggctaccaaatcatgattataaaaccgaatgtttttgtttccacccgggaagccttttcaaacattcatccccatcgtccgaaatatccggttagggaggcaatccagcgtcctgtacaagaatggaaggatacgttaatcaatgattttgaagcaagtgtattcccgcaacatcccgttatcgaagaaatcaaagaagagctctatcatcaaggagcaatctacgcatccatgagcggctccggctcatccgtattcgggctgtttactcccggattcgtcttaccagaaattgattggggaactgacgtattctgcttcaaaggtacattaaacaaataaatctcactaacaattatgttttgactattttttcaaaatcccaacatggcagcggggtgtatattgagtacccggcaaagcaagcgagctatttttaaagtaggttccgagcgacccgaaatataatcattcacgcgtgaagggctaacccctatttcactggcaagctgtttttgtgtcatccccttttcttcaagggacaattctatcaattctgctacggttggtttttctataggaaaatgttccttctcatacgcaatcactatatcagacataacagaaagctccaccatgctcttgtcatttgcaggagtgctgtcgtccaccaaaggcagaagttcttcgactcttgccaatgcaaattcgtattgttctttcgttattttagtcatatctattatattatatagttgaacaatctattttatcatactctttatgagttcccacccaacggacaaaaatgtatcccaccgtaaatttaacaaccactaccagccgatagttgttccctctgatattaaaaacatagtgttgattgcccacataatcagtcgatagaaaatccgcttttatatcagacaaattccgccattctgctttttccgctatatcataccaacgttctaaagcaacacgtgaatcttcacaccctttcgtctcgtagaaatctttcaatttcttatgtgatactactctcatatcttattcatttgatacaaaattacaaaataattttggataacaaaagaattagtgctaaatattttataaaacagaacatccatgctgggcgtaccaaaaaaacggtaccacgactcacgtcgtagtaccgtcacaacacaaacacaaaataaaacacgacaaaactactatgcaatctttcctgtctatgccggggagacataagtactatttacgaatattcgcatactcataaatagcttcaggtcgattagcatcaattaaacaaatcgcatgcacgatttgtttaaacttttatgttatttaaaacaagtttctcttttattgaatccctctttcacggagtttcagctgccagttccatgcagagcgtaaagtatcttctaaagtttctacggctttccaacccagctctttattagcaaaatccgggttagcccaaactttttcaatgtcacctgcacgacgtccgacaatctgataattcaattttacgccagtggctttttcaaagccatttattaattccaatacagaaacaccacgtcctgtaccaatattaaatacttctactttttctttttgtttcttttccaagatacgacggatagcaatcacgtgtgctttagccaagtcaacgacattgataaagtcacggatacaagaaccgtccggtgtatcataatcgtcaccaaacacgctaagtttctcacggatgccgatggcggtttgggtcagatatggaatcaggttttgaggaaccccattaggcagttcacccagcaatgccgtaggatgcgcaccaatcggattgaaatagcgcagcataatcgcattgatcggagcacctgaagctaccgtatcacgaataatctcttcattaatctgtttcgtatttccgtatggcgattccgctttcttaatcggagccttttctgttaccggcaattcatccggctggccgtatactgtacaggaagaagagaacacaataccttctactccatgttttggcatcagttcgagaaggttaatcaaagaaaccaggttattacggtagtaaagcaacggtttctgtaccgattctcctactgctttgctcgctgcaaagtgaatgatcgccttaattcctttatattttgtaaatactgcatcaagaccagcaaagtccagacaatccagcttttcaaaaactgggcgaataccggaaactttctctatattgtcaacaacatcagcacttgaatttgataaattatcgatgatgattacttcatatccactgttttgtagttctacaacagtatgagaccctatgtatcctgtcccgcctgttactaaaattctttctttcatatactttataaaaatggttagtttctcggcttatcattgtttgagttacaaatgtatggaaataaaatggaatagcaataatttgccacaattttatttgctgaaaagtaatttaggtacgattgggtggcaatcaggtataaaaaagaattggaaactcaaagctgtatgacgccatacagcagagcttccaatcccctatttaattatcaactgtaaatccttacaccacgccggagaatcccatgaatgccatagcaagcaaaccggcggtaatcaaggcaatcggagtgccttgcattcctttaggtactttcacgaggctcatctgttcgcgcaatccggcaaaaagcaccagtgccagaccgaaaccgatggccgtagaaaacgcgtacacaacacctgtcagcaggtcgtagtctttctgaatcaccaggatagccacaccaagaatacaacagttggttgtaatcaaaggcaagaacacgcccaaagcctgatacagagcaggcgatacttttttcagaatgatttccaccatctgcaccaatccggcaatgaccagaatgaacgtaatcgtctgcaaatatcccagcccgaaaacatccaatacaaacttctgaatcaggaaggtaacgatggtagcgatggtcaacacgaaagcaaccgcagcgctcatacccatcgcagtctctactttcttagatacgcctaggaacggacagatacccaagaactgcgacaacacgatgttgtttacaaagattgccgaaataaatatcaatatatattccatattcttttcttatttaattgaattaggctttcttgaaactgttaatcagcgcaatgaggtatcccaaagcgatgaaagcacccggagccaatacaaataccaacattccatattcttccggcatgatggtcagatcgaaaatcttaccggttcccagaaattcacggacagcccccagcaatgtcagggcaatggtgaaaccaagtcccatgccgataccgtcgaacatagaagcaactgcgttattcttggcggcgaatgcttcggcacgtcccaacacaatacagttcactacaatcaacgggatgaaaagtccgagcgtagcgtacagtccaggcacgtatgcctgcatcaccatttgaagcaaggttacgaaagacgcgatcaccacgataaacgacgggatacgcaccatatccggaatcaggttcttgattaaagagatcaccacattcgagcagatcaatacgaacatggtagccagtcccatacccataccattgatggccgacgaagtcgtacccaatgtaggacacataccgagcaggagtacaaacgtaggattctctttgataatcccgttcatcattactttaaagttattcatatctgtctcctttcttatttagcactgaccgaatcagtaagttcaacttttatcgtagctcccgtagcagtgtcagagtctgcgcctgtagccttttgagaagcaccgctgacaccattcactttaccaccttctgccttataagcctgataagcagcatttacagcattcaaaaacgcacgtgaagtaatggtagaagctgtaatggcatccaccgctcccccatctttgctgacggtcaacggagcttcacccggattcatccccaaaatagactttttactctcttcatgagacacagcctgttctcccttggccgggtcgtatgctccgaaccatttgtcggctttagaacccagtcccggagtttccgcgtgagcgagtaacgagtaattatagattttaccttcggcgttaaagcctaccaacactttcagttcgccaccaaatcccattgatttagcttcgacggccgttcctaccaattcttcgccgttcttagccggataaacgataaagtcaacattcttctttccgtctttctcgctgaagatcgtatcgctttccgctaccggattattggtaaattcgggaagaacctttttcaaagcctcgttcagtgtcttcgcattcgcttcggcaatggggccttttgtcagttcatttacataagccagcaacgctacggagacagcagtcacgcccgtaagtaccagcaacatattctttaaagatgattctaactttttcatttcttcttcgctacctccccaaagcgttttggtttacaataggtgttaatcagcggagtgaacgcattcataatcaggatggcgaacgacataccttcgggataagcaccgaacagacggatgacaaccgtcagcagaccgatacatacaccataaatcaacattcctttcttactcatcggagaagtcacatagtcggttgccataaagacagcacccagcatcagaccaccggagagcaactgcaatatcggagaaacatatttttccggatctgccaagtgcatgatacctgcaaagataaacacggtagccaggatagacacaggaatatgccaggtaatgatcttcttccagagcatataaaccagtccgatcaatagagccaatgcactcacttcacccaagcatccgccattctgtccgatcagcaaactcaatgcatccggaatctggtttaaagcatccatagccgcacttttatctgcagcatgaatcgcttgtttcatcaatgccagcggagtggcaccggtggtagcatccgtataggcggtcaactgtccgactaccggccagctggtcatctgtaccgggaaagaaagcaacaggaacacacgtcctgccagtgccggattaaaaggattgcaacctaatccgccgaaagacattttgcctacaccgatagcaaacagtgcacccagaatgataatccagatagggagattagacggtaagttgaatgccagcaacacacctgtgatgatggcagagccgtcgcagatggtggtggtaggtttcttcattaaatatttcccgatcgcccattcgaaaaacaaacaagctgcaacggaagtagccgtgacaatcagggcacccagtccgaagaaatagagagacaccagaaaagccggaatcagtgcgatcagcacgccatacatatttttctgtacgctgtctccgccatgaacgtggggtgatagtgatacgattaatttattttccatattcgttattttttagcttgacgtgcacgaatcatagcacctactttgcctttgcccagacgacagtagtcgagcaacggacggttggcaggacaagtgaactggcaagagccgcactcgatacaatccatgattctttctttttccattgtttcaaaatctccgttttcggacaaggctccgagcaagtacggttccagtcccatcggacaggcactcacgcacttcgcgcaacggatacaagtctgcgcctcaccacgtttggcttccttctgattcataatcaggataccggaactgcccttcgcagtaggaacctcgatatttacgagcgccttacccatcatcggaccgccaccgatcaccttacccgtatcttcgggcagaccaccgcaagcgtcaatcaactgtttcatcggtgtaccgatacgagccaggaagttggaaggtttcgcaaccgactttcctgtcacggtaatcacacgttcgaacaacggcttatttttctgtacagcttcataaacggcaaatgctgttcccacgttctgcacgactgctcccgtagagataggcaatgcaccgctcgccacctgacgtttggtaatcgcgtcgatcagctgcttttcacctccttgcggatatttcaccttcaagggcactacttcgatacctgcatagctggaagccactttggtcatcagttcgatagcatccggcttattattttcgattccgataaatgccttgttcactttcaccgctttcatcaggatagaaacacccaccatgatttcttccgcgtgttccagcatcagctgatggtcggcagtcaggtaaggttcacactctacggcattgataatcacacattcagccttgaaagaaggaggaggacaaagtttcacctgcgtagggaaacaagcaccgcccagacctacgattccagcatcggcaatcttcttcacgatctcttctgcggaaagttcacactctttcaccagtgtggtgctacggtcgattgtttcttcccattcgtcgccttccacatcaatgaagatggcaggtttcgcataaccgctggcatcgactatggtatcaatcttcgccactttaccactgaccgaagagtgaattgctgccgaaacaaagccggcaggttcggcaatccgtgtgcctacctttaccacatcccctttcgctacaaccggttttgcaggcgcaccgatatgctgccccagcaaaataacagcctttgcaggaacttccgctgtgataataggttgatgtgccgacaatttattttcgtgtggatgaactccaccaattgaaaatgtctttaacatacagttctgtatttttttctgttattattctgttactttcggagcttctgtagcctttgcagcaggagtttccacttttgtagccggtttcggagcagccggagcttcttctttcggtttccgcggcgggaaattcaattcgataatggtattctgcggacagacttccacacatttccggcaagatttacacttgtgcggatcgatgtaagccaagttgttctccaacgtgatagcttcgaacggacaagtcttcacgcatttgccacagccgatacaactcaccgtacaagccttgcgtgccacagctcccttgtctttattcacacaagagatatacacacggcgtgatttctttccttgcggacggatttcgataatcgccttcggacaagccttcacacaggcaccgcaagcggtacatttcgcttcatccacttccggaagtcctgtttcaggattcatgtggatggcatcgaactggcaggcagccacacagtcaccacaccccagacatccgtaactacaacccgtttccccaccatagagcgaagcggcaatagcgcaactcttcgcaccgtcgtactgattaatacgcggacgattcatacacgttccgttacatcttaccactgctaccatcggttcagcttctccggctgcaagccctaggatatcagcaatttgtgccatgacaggctgtccgcctacggggcagaatttaccatccagcgaaccggctttgacgcaagcgtcggcaaagccgctacaaccgggatagccacatccaccacaattagcctggggaagcacttctcccacctgggcaatccgcgggtcttcatacacggcaaatttcttggaagccacataaagaatagcggccaacacgagcgctatagctcccaatgaaatcactgcaatcagaatcaaattcataatgtttttagttatttattggttttatagtaaatgaaaattgttgtttgagtcgcgttttgttaagccataaaacgaaataataaggtataaggacagccagagaaagaagagccgcatacagttcattctctaccaatgccatcaaaagaaacaacgaaaatataagaagtacgaaaggaagtacgaaagccaacactaccgccatcatgcccatcgacgtttcgccgaccaccatcaccttctctcccacctgataggaagaagccgcggtatctataatatctatgattttgtccttactatccgccgaggaacaatgcccctttgcgctacaagccgcgcaagccgatgtctggacaatcctcaccgacagatgagaaccttggatgttttccacaatacctagatgctttatagtattattcgtcattttgcaaactccgcattacaaatcgcggcaaatttaatcattatttgtgaactacgaagcattcccccaactttttctacataataaattgttattttttgcgttttcgttatcgcacacggaaaagatatagctaccatttgatatttttcaagaatggcaaatagacatcctaaacaaaaaatcccagccgttttatttcttcagccgggattttccatcaattatttcacagattactccactatccatttctcaatattacgcattttcgcgttaaagttctatatttcaaactccgactctaccgcattggtgttcgcataaaagggaagcaaaaatttaataaatccttcctctacttcgcgattagggaagcctaaactataaattccaaattcttcgtcatacccttttatagtgagataaccgctctgataaatgaccggaatgggattgtccgatgttgaatcaatactgttcaatacagcgacactcgtttcctcatgcgccatacgttccaagtcataatgatgttttttcagcaactccactagataagtaggagttcccgtttcaaaccaataactaccgaactctctatatttaaaagtattaagcaagctgaacggattatatattccgatagaattgtatgtaaaatgatagccatcatagtactccctcaatctattgcacagttcaccataagtcagctcctttgcatccgccagttcatgcagttcaatttccaaattatcatgcaattctttttcagaaactccgcaaagatccacgtattgcttccgcattgagatgtcatcgagattatttaaatcgctgaacacgcttaccttaccaaatttcgtcactcccgtcaaaaatgcaaactgaatacaaccgtccatggtcttcagcacactataaaaagctttcatggtattacggaattccttctgaagctcctcgttacctattgcttgtaacatgggcttatcatattcatctatcagaatgaccacacgctgcccggtttgctcataagcccgttcaataaggccgcgaaaacgcaatgcaaaagttgtttccgacggagcggtgccatattgctgttcccatttctccaatgtgaaattcaatatactgtccaggctctcccgcgtatcatacttctccgtattaagatcgatatgaaaaatgggatatgtagtccaatccttttccagcttttccatggccaagccctcaaaaagttctttcttgcccaagaaatacgcttcaagcgtagatatcaacagactttttccaaaacgacggggacggctcaagaaataataactgcctgtcttcaccatctgataaatcaaagcagtcttatcaatatagaaataaccgtctttccggattttttcaaagttctgtatgccaatggggtatatcttgctactcatacgcttctttttcttaaattataaaaattaccagacaaatcttccatatcaatcttatttttcacaaagctacaaaaaaaatccattcataaagaccgcaggcgggaaactttttcccgcctgccgcttttaccttatctgttttttcaccgttctcctctctcctcctcttttcttctcctgtatcgaaaatacattctcctccattcatcccagataactccggcttcctcttcattgaaggcatccagacagcactccaccacttttacgtaatcactcaatgggcgttttgccccttttttaaatcattaaaagtagagtggccgatgtgtacgctcttccgtatttcgtcatttttcaaatccgcacgcttttgcaactctcctatgtaaactcctaaagctacatataaacctttttcattttccattcttttttattgttaaaattacaccgtaacggttaattattttcactttcatcccaacatgtcgggacgatgtctattttgcatttactaattttacgccgtgttttgaaacacactcatattttttgcaaaaataaacattttaacttgaaacaaaaagaaaatgatgtcaaacaactacagaatgtcctattttatgccacctatcgctcccatcaaagacaaacaaggccgactgatgactcctcccacgcttatccccttctgcgaagtctccatcgaacaagttttccaaatgattacttgcaatgagaatctcaaaaccctgaccgcacaagtacggaatgccacagatatacgagccgccaaagcatcattgcttccctatgtgaccccttgcggcacattcacccgccgtagctgtaaggatttcgtctccccgtctcatctggtgatagtagatgtggacggtctccactcttatcaggaagcagtagaaatgcgacgtatgctctatgacgaccctctcctacaacctgtactcacctttatcagccccagcggactgggtgtaaaggcatttgttccttgccattattcctccacgacaaatgatacaaaaaatatcacagaaaacatgagttgggcgatgcggtacgtagagacggcatacaatacggtaacagcggtttcttccgaaacgaaatccaaagtagatttctccggcaaagacctcgtgagatcctgtttccttagttacgacccggaagcattgttcagaaccaagtaaacgagaataattaaacattattttataaaaatcaaaacatgaccgatattgaatctttatgccgtctcaccgaagcagtcgaagcggcaggagcggacattgctcccacttatcttgaatacgtacaattgtcattcgccatcgcaacggattgcggtgaagcaggacgtgacttttttcatcgcctgtgccgggtgtctcccaagtatcagcgcgaacatgccgaacgggtattctccaacgcactccacacccaacgtggagaagtgcacttgggcaccgctttccacctggccgaagcgacgggagtaagcatctgcatagaagaaatgcccaaacatcccacaggtacaaaaggtacagcaggtacagcacgcaaatttcccccacacacgggcgcgtataataaggtagggaatgacaatatctccgaagaaagagaaggggaagaagaactattgccgggcagtgaaccgcaacatcaattgcccacttttccgaaaaacaactggccggaattcttgcaacgtatcataaaagccgggagcagcccaatacaacacgacatcatgttattgggagcgctcactgccctgggtgcttgtatgtcgcgccacgtgcgatgcctatatggcggcaaataccatcaccccagcctccaatgtttcgtagtggctccttcggcttccggcaaaggtatcctttcctacatccgcttactcgtggaacctatccacgacgagatccgcaaagaagtgaccatacagatgaaagcatacaaaaaagagaaagccgagtacgatgcaatgggaaaagaacgaaccaaaaaggaggctccacaaatgccccctaacaggatgttcctcatttcgggcaacaacaccggtacgggtatcctacaaaacatcatggactccgacggaaccggacttatctgcgaagcggaagcggacaccctttccaccgccatcggatcggaccacggtcattggagcgataccctgcgcaaagcgttcgaccacgaccgcttgtcctacaaccgccgcaccgaccaggaataccgggaagtgaagaaaagctatctttctgtcctgatttcgggtacgccgtcgcaggtgcaaactttcattccgacggcagaagacggatcatactcccgccaattatattattacatgtgcggaatcagtaaatggatcagccaatttatggacaacgagatagattgggaggagatattcaccgctatgggactggaatggaaagaaaagttgagcgtgataaaaacacacggcattcataccctgcaacttacggatgaacaaaaagaagaaatcgacgccgtcttttccgacttgtttgaacgctccagtgtagctaatggaagggaaatgtatagttttgtggcacgtctggccgtcaatctatgcagaatcatgtcggaagtagctgtattgcgtgccctcgaaagcccgcaaccctacgacttcaagacctctcccacctctcctttcacaccggacaaggagattcctgcggacaaccgcaaagatgacatcatcactcgttgggatgtatccatttcacaggaagactttcatgctgtgcttagtcttgcggaacctctctactgtcatgccacgcatattctatcgttcctccccaatacagaaatcagccaccgtcctaatgccgatcgtgattatcttttccagaaactgggtgatgaatttactcgtacccagttactggaagaagcagttgccatgggaattaaagaaaacacagccctcacttggctgaaacgactcaccaaacacggaaaattaatcagtatggacggtaaagggttgtatgcgcgtgcgtgtgtgtatgagtgaaccggaaaaagtgtacctactgtacccgttttacttacggatgcagtagtcatttcaattaccgcatccgttttgactgatacaatcgtttgtcctgcataaagcatcgctttaggaggtgtaaagctaagctttagacatcgtaaagcggtgctttagacaccataaagcaacgctttatttaaggctctcccagggcatccacaatgactctcacctccaatggtgtgaatgagcgtcgctttgattcgtagcctaagtcgtacaagcgttgcagaagtccgggacacaaagagatccatttcttcatttttcgataggcagcaatgtcagttagttgcggagaataaagttgcgccagttccatgcgtccgtaagcacgtatcttaaattcgctcatgatggttatgtttctgatttactgttacaaaaatacgaaaaaacgactatataaccaacgtttttccattgaataaccgactataatgacaaataaccgaccgctaccagacacaaccgtatactgctgatttccgggagatccggagtagtatttttgtatcgtcgaaagggaaaagaatccccggacaatatgtttaaccctttaatttattgttttatgattcgttacaaaatttatcagaaccagcagaagaaaggcttgaatgcgggtaagtggttcgcccgtgcagtaagcgacgagacgtttgatttggcaaagcttgccgaacatatgtcgaagcacaattcaccgtattccggtggtgtcatcaaaggtgtgctttcggatatggtagattgcatcaaggaattgttgctagacggcaagtgtgtgaaaattgatgatcttgccatttttggtgtgggtattcgcagtaaggcagccgatacgctggaagagttctcgttagagaagaatattagcggcatgcgtctgaaagcccgtgccacaggtaatctgtctaccacgaacctgaagctcgacagccagttgaagcagcagacggagtatcagaaaccgacaactgccggcggaggttctgattcgggcgacaaccctgatccgaaaccggatggaggtggcgaagcgcctgacccggctgcttaaaaggttcaccacagaggacacagatttccacagattatattgaattggtagttgctaaagtagtcgattatttatctgtgtgagtctgtgtagatctgtggtaaacctatggcaaacctacagtaaatctgtggtaaaagaaaactattattaatttatttaaaacctgttattgtatgagtaaatcatcatctccccgctctgtatggagcttagtcctcaaaatcgttatcactgtagccaccgccatcggaggtgtgttcggaatacaaagttgcatgtaatcccatgcggattattacattaattatcattcattgcagtgccacgccggaaggaaagtccctttcggcggaggcttgccgacaggatcatatcttgcaccgtggtttccgtgatattggctatcatttttacattactcgtgatggggagattcaccggggacgtgctttagaaaagattggagcacactgtcgtaatcataatgcccattcgataggtgtttgttatgagggaggactggatgcgaacgggaaaccgaaagatacacgtacattggagcaaaaaggagctttgcttgctttgttgagggagttgaaaagacagtttccgaaagcactggtcgtgggacaccgggacttgaatccaatgaaaggatgtccgtgttttgatgcggtgaaagagtattcccaaataatttcttatcaaaaatagctccttttagatttccaccacagcttattgtataaaaaaatatcaacgatcttcacagacagttggtatttttggaaatcatattagtgttaacactaatatgaagagcgagattaggacaataccactatattgctcctaatctactaaatgtagggattcatgtttgtcacatgaatctagggacctacatttttccatctcattgtaaatattcaattataacataacgtattaaaaagcactttcagtacttcctattcattccatctgtttttcatcgtttaacgagcataagctccatctttagcctcaaagatgacagatggttcaatcacttccacagtatgccatgcacccttaggtatctgacaaccatacttggcttctataggattgagatggatacgctgtacttctcgatactcaaccttacgagctacatcttgtacactcatccccttctgaaaatcatccgtatccttctcatacgaaacgacttcctcataaattacttcgtccaacttaccacacaggcagattactgtttcggtagtatcttcatgtcgatgaatgggcacaactgtacccggaagtagcgcgttaagcattcgctggctggtatcggcaggtgaggtacgcaaatcgaagttctgacgcaaacgtggattctccatagcttgctcaaataacttatctaaaaattctttatcaaattccataatcgttattgtttcaatgatatgagatattcttcatgtaaacgatagtattttttcatgaacaatatgtaagcaatagctaatacagctgatacacccaccagatataaccaatgagcaaacaccgtatcggaacaaagatagataaatcctagagaaatcactaattgcataaccgtatacaacaatgcaacttttacatgccccactttcaactcattagccataatctgataagcatgtttacgatgtgcctcgcccaagttctcgtgcaacataatacgatgtacaatagtcagacagccatccacaccatataccaacaggaatatcagccaagtaatatccgttgtcttgatcatcacattacctaacagaaacagtatgataaaagcaatgccgatagagccgacatctcctgcaaagcatttcgctttccctttcggacggaaattgaaaatacaaaacaccaatgaagcaagaaccgtagatatgatcaaactctgttctacaaaaacgccatttatattcaccagtgccaacggtatcaatacagccaaagagtatcctgctgtgataccattgattccatccatgaagtttattacattcgtggcaccgacatagactattagtgccagtaatattatccaccacattgaccaatgtaatatgccaagctgatagaatgccattgcggcagctgcaaactgagcaaccaatcttacagagtccggtaatgaatggatgtcatctacaaagctaatgcttgctactaatgtcaagccgactagaaaccaaggatattgaaagccaaagaaagcgccccaaatccatacactaatcaagaatattatacctccaccacgcaatacaatcgtagagtgtgatgagcgttcgttgggtttgtcaataatattaaagtggtcagccaccttgaaatagcataactctaatgccaatagaatcacaaaaataattccgtaagtcaagtatgcattcataatcattctactgcttaaaacttctaatagtgtccatcaatccatccttcgctcttaccggcatccgcgtaatgccaagagcagccttgatcttggcattactcactacataattttctgtgagtttctgcatccgaaaagggttaagcggaagatgaaaccacccacccacttttgcaactccgttcatcagacctttcggaatgcaccatatatgagttttcttaccaagagcctcacaaataacctgaatgagttcattagttgaaagagcttcatcgtctcccatatggtaaatgcccgaagatacattcttagttaaaaatccgtcaattactacacaaagatttccaatactggtaaacgaacggcgattctcaaaagcaccaagaggccatggaatccccttattcactactccataaagaagattgaggttacccttgtttccaggaccgtgaatcatacaagggcgtataatgtacacattcttcccttttacaagagagtcgccatcatcaaaattgtgataaggacgtttgagagcttcaggtgcgaaatgcccgattatataatcctccgctttaattttactctctccataaggacctacgggagtgggaacgcattcttctgtaaggcatttgccttccactttgtcagaagcactctttacggtagagaaaaatataaacttctttgcagattcattggcaagaaaccaatcaaaaatacgctgagtaagacctgtatttaccttgaaatacacatccgccgcactcttgttccgagtgtcatgtgccttaccagcaagatggataacagcatcaatctgcggcaaatcaatgccacccagatcattccatgagaaagtctttactataccgtccttctctggagccacaatgtccagaccatatattgtattctcaggcgaaagcgctttcactaaatttgagccgacgaaaccgtggactccagtaatgaggatattcatttgataaattattttatgttattctattatttcttccagtactgatatcctatactcctaaatagaactgaattaaattcttattcttatgcaaaaaataaccacctcattggtttcctcgctataaattacttatccgtcgtccttcttgctccatccacgcagaaatccacctgtccaatactggcactatctcgcatttgaagtcattatttctgggaacaaaaccctcaagttttggccatgcttctacaagagaataagttccgtcaataatatatccgccatcgctaagtttcttaacgagttctatttgatgattatcggccatttcattgaattcatgcagacgagccatggctatcacttttttgcctgctttaatactgttaaaaagagcaccactacctgcatgagaaatcacaacagaagcattcttgatatatttcttgaactcattttcaccggtaaagcgtatggtcgtaaacttattggtctcgaagtcggtatttccgatctgcgctacaatttcttccgtaattccatatttcccaataagcatctctacttcctgtaaacaacgaagaaaaccattaggctgtgttcctactgttacaaaaatcatattcttgtcctccttatactaaggttccataatactctgcatgtcccttataaacatcaaccatttcgggccactggactataaccttgtctgcaaagcgttctacgatcttacctgaaatagttttgttatacactttggcgcgagtctcaatgtacacaaaatgggaaccatgaaacttcgcaataaaacaaagtggcactgcaatattacttcctgtagagataatcactttcggacgatacttcttccatatcgcatgacactgcttgaagagcttccaataggcagacagataactcgcatgagtcaatttacgatctttatccttagtaagttcatcacgtttatccgcaaacgccatcgcaaactcaatcgcttttacatctttaagtgacggtattcctttatttgcgcgtttattatcggtgagtataacagaatcgtacttgctaaagagctccttcaaagccatcagctgagcaaaatgccctccttcattacaggcaaaaatcactatattattcaattttaccatatgtcaccatttatctattctttatttaatgcattcacattctcagcctctatcaattcataatccttataatataaataacagctccctatcatatcaatgcaatattgtgccaattctttactcgtatataatttacaaataaaaggaaagcagacgttgtacggatttgttcctgcgtatctgtctgcataacgttccggctcattctcaggatcacatacactattatatgcatttacataaaactcatgcctaccttcggaatcaataatagtatgattacatattcccggattacccactttccactctcgttcaattgtaatccattcaccggccttcactagaaaagatgaaagttcgtcattcaagtcatcatagttctcaagaccaatattgacatcacagtgtctcctccgacaaagtaaatggaaatagagttcttttgaatcaggggcaggttttgatatcccgaaagaattggcagaaccagaatacatatctgttttctgacctgtagatgagccaaaattacaccatgacccttgaatactaaaccatgtaatagcttttgggtatgacaacatagcttctttcatatcttcgggtagaaagaacttgattctatctttgaaataagttaacggatactttgccaaagaaaactgctgtctcatatttgaggcttctttgagtaaacttttgcagtttatcatcaacacattgcgtttttctcctgttgggtctggtacaaacgaatacatcatcccttcagaaccattatggacatcttgaaattccgaaacgtcacaagacaagtcattggaatatggcttataatgctttacattacggtcatactcaaaaaacacttgtccttgtactactttttcgcaatcattaaattgcactttcccttgtttgaaaagagtataattctcgggcttcactcttctaccattccgatatataaccacttctgacaaatccgcaaactgatcttcacactgatatgtatttttaccattgatagctttcttcaaagccttagttttaacttttgtcgtctcaatcagcattctattcttccgcatatattgctttatatcaggagaattatcaatatttgtgatatcataataattacaaacaaacgactttgaataagcgtcaggtacttgaaaaaatcacactttaacagtccaaccttgctttcaataatacctttataagttttggaagccgatattgcctcctgataagtatcgtaaagatgagataaaatttccacatagcctgaaggtcccttgctttcatcacctattctgatataattataataacgtctagttttcttagactttaggccaaaacaaattgttattttttgcgaatcaaaattttccggaacattccttacgtagacctccttaatatacctatttacttctttattatctgaatatggctttacccccttttgtatagcatacaaaggaaacagacacaacaacactattgcaaaaaacaaaaacgtaaatacctgttgcatcaataaactatttcgtctgatttttttccctataaaaaacatatctatatatctacctaaaaacattgtgtatgtttgattttcaatacactctcaacacttaacatgtacatattcttctgatatctcatttattctgactttgcttcccatatccaaaagaatttctgaagtaagataatccataaatccgccgagtgaagtaaaagtaagttctccaaaatatattttttcatttacttcgtataggtcaacacgaagtatagggaactcttcagataacttagatgcaacttcaagcatacgttcaaaacactttggtttaggaagaatttctttaccttgtctgtaatgctccgtaaatacggaccactccggatgataattccaatccaaatcatagactccggtatcagccccttcctttcctctgttccaagcacaccatatacaatatggtttaccattgagacaccaaaccttataatcaattagcgaagaggtattgatagactgtttattaatatcaagaagctcctccgctatgacacaaggctgaattctggcataatgaggttcacccgtaacatcaccatatttaattgatacaagtctatcataagtatctataacagtagctttatcaagcttatctttatcacgacatataagaatatcaccacaaccgttattcacttttaagacgaactgattgggaagcctgtcccaatctatatcacttgccttgtcccatcgaccataaagttttaccagtgtatctccaagtcctaaagactgcacatattctctaaccttatatttatcagctaagtcagcccatcggctagtatcaccataaaacttgttccaattaatcttttcgttaatatcggtaggatgctcataattcggcatcttatgaaacttgtagaagtacttcaaccgagccacttgtataggcttcaacaaatgaagtttacaaaacaaagctacaactgcaagaatgactttcttcataacagtatattataaaatattgatatctttcaataagtcttttgtaatgacagtctttatactataatcgtaaatctgttgtacatccaatcaagagattagcgcaactcatcctatcttatattactcgtttttaaaattttatcatagcaccctattaattctttttttatagcctcaggctgatagtcccgacttattctgtaactagcttcaccatacttctgcctaagctcttcactttcagccatcattttcatagccagatatatctctttatcatttccgggagtgacaaacaccccactcacacgatcttgcacaatagaaggaatccctcctacattagtggttatgacaggtttatgatatgattcagcctcaagaatggaaataggcacaccttcaataaatgaaggaagaatgtaaacatccgccaaattcaataaatattgtttcttctctttatcaacccacccctcaaatcttactaatgtttctattcccaactctttgataattgaaagaagtctatctgtctccccgttcccccctatatgcaaaactatcctattttgaagttcctgcttatgatctcctatcgccttcaaaacattgaaaatacctttgctatcacaaattagtccaaggaatagaaaatgtacaactccattcttttcaacattctcaatatttggttctcttatcacatttttgatagtcacaatatgcttacatccgatactctggaaataattattccattcaccggaaaggcacacgacacaatctacttttgctaaaataacatccacttttttaatattcgagagtctgaattctttaaagccacctccgtgacaatgaaaaactacttttttccccatcatctttgcaatctttattgcacaggtctttcgccaaaagctagtaccagaagcagaatgaatatgtacaatctcaatttttcgatcagtgaaaagtttccaaatgagcaacaaatatccactgacagcataccatactttctgcacattgttcaattcacttgcagcagtcctgacaaacttgaaaggatgaataaaaatagaataagtattgagtacactagcaatgccccctttgggaatcttgtaatccattcccacaaacagaactttctcaaatatacttgattcagacatgaagtttattcattaaagtattccacatattttcttgcacacccagcaattgtataaggactgttgtccttcatgctcattgcattttccttaattgaatcataattatcaatggcttttattaaagcattcttgtaatcctccaaactatgagatttactgagaaagccatttacaccatctttaatcaaatccacagctccgcacaccggagtactcacagctggaagtcccgcaagacttgcttcaagaagtgtgattggcattccttcaaaatttgaggatagacaaaaaataccggcatttagcatataatcagccacattttttcgaggtccgacaaagtgaatcctattacacgccattgatactatcgactgtccttccggagtattaaatcctgcacccacgacaatcaaatcaatgttgtaaccctcttgtaccagtatgttcactgattcaatcagaagcttctgattttttaccggatgacacctcgcaacatgaatcagtaagagggaggaagcgttgtttttaagcagattcatctcattgcttaccgctccaaataaatctgtagaaactattggagctcgtccattagttatacaacgtataggggtgcgcgaataaaatgccttaaaatcagcatagtttttttctgagagacaagacaatttaaaacggccccatcttcccaaaatattgcaatacaacctcagcagtcccttatcgtaaccattatgcaaatcactatgtacggaaaaatacactttcttcgaaaaagaaagcaatcctatagccaatgcactatatttaagggtaggaatcatatgtacatgaattacatcaggattgagtgctttgagagcagtatataccctccactgactagacaacttgaggccattcggaagccctaaattcacataatgtacactatcggaaatctccgatctaaaaaaattcctaacttccgtttccttcttatcatctaaaatagtgacaagatatgtttcgttttctttagctaactgattacttaaatcgacaacaaagcgttctgcacctccaccggctaagaatgttatgagttctactattttcattattcctttgtttctattttctttgcaggactacctccgacaatcacaaaaggctcaatatctttggtagccacagatcctgccataatcaccgcatcagttccgatatttattgtccctacaatacacacacgagaatttatggttgcataatctccaatgattgctgatttgccgttgtttgttccaatattcacatactcataaatagtgacatcacctatatatatcacagcaataacagttaaaatatttcaacaatcaaaaaaaagataaatgcgtctttatacccccattttttatcttttaatcaaccatcgattttgaatgtactcaggatgtttattctctccaattactctacaaggatttcctacagcagtactattcgaataaacatctttcgttactattgaacctgcaccaatcaatgagttctcgccaatatgtacaccttctatcaaacaagtcataggacctatatatacattattgccaataattgcttgattaccctcatttgtacctatattactcatctgagacaaattaacattatttccaataatacacctaatactaacacacatgctcattgcatgccctaaatacaaaccatagccgatcttagatccagcatgaactcgacaatcatacttaagtttataatgttcatgacgcaatttacatataggatagagacagccacgataacttgcaaatctcaaccaaaacaaatgtttaagtgccctatcacgaaatgactttaaccatatcaccccaagactatcgactcgtccataaatcctaaagtaatcacttttcaggagttcaagacagtctctgtaacttgtgggaataggaatatctatttcgctcccgtttctagttttgtagtgttcaaatttcatagtaatttatttttttaaaatcctcttcgctaaagcagcagccacattcaccattttactcgctaacggataacgtttaccaagtacgtcaacaacaatcactcctttgtaagaattcaaagtatgaaatgactgactcaattcaagatgaggtgatgccattcttctaacttccctaaagacccattttccatcaacaaaagaggtttcttgcaaagagatagcatgaccataattggtattactctcttgtgcaggacgatacacctttccattaactttgaaaaaatacccagccattcgagcaatacgctctggaaaaatgctactcgtcacatatacaaactgttgcttcgtgtcactccactcatattggtcaagctgaaagccatttgcatactcggcttgtgttgtaaataattgaggtttcccaaacaaatctgtaaatacagcatctgttaatggtttgtcagacaattcatgaatcaatgtcatgtcgtcatttataggattatactcgtagatattaagtacaccatcttcactgttttctggataaacatatattttatcatctttacgatatataataggaaaactcagatgtcctggacgttccaatatcactttcttctctataacgtaattgttcctcctgtcaatcactaacttcgagattcttcccttagaaatcttcttcgtcacttcctccaccaatactatgatagtatcatcagttacatcaagaataaacggatcagcaaaccaagaattggggaaattatgagttacaagagttagtttaagtttatcacctctaacaataccttcaaaagtattatccaagaaaccgatttcccaatgaagagaagtcagctctttatacaatttccgcaatgcattcataaataatagaatttacaatcgattcctaagtgttgttttgagttctctaaataaactatgccaaaatggcttttggtcttctttaaagtaggtaataaagcatgttgtacgtcgataatttcgccaccactctttcaatgagaactcacgtttcagcatgcacttaaaataatatatttccggcattaaataagtagtgctaacagtggacaccgacaactctttttgccaatcacctccagaataatacaaatagtaaatatatggaatattcataccagccgatgtttggcaaattgcatttccatcatttctgaaatttgtttctgtaaaatagttcttacccgttgacttttctttcaaaaactcaatgctgaaggttcctgaataaccaacccttttaataaactctttagccttactaagtgtatctaagaactccggttcaacctgatcaaatttcaaaaagaaagtattatctattccgttaggacgatcaatatgtgtacgccctgagataattatatgttttccattatccattgagcaacctaaaaactgaaattcaaaatcctttattataaacttttgaatctgtataatcggacaatgctcagaattcgctaaaaattcctccaattcttctcttttcttacaaattttaatattttttttgcttccctccacacttgaaatagccttggttatacatggaaactcaatatctgtaggcacttccctatcagataccatccacgtacgaggaacatcaagcccaacctctcttgcaagatcagacatatattctttactcattttacgttccaaacttcctggcatatttgttactggaagtataaaaaagggacttagccgttgaacagaagaatcaagcacagaagatatgttatcatacgatgaatacactatcaccttgttttttgtatcagaaaaatgttttagcatttcatcaaccacttgttctggtgatgagcatacccaaccttctattacgtacctacttttaagtacaaagctgtttatattttcgccaactataagcacataagaattgagccctttttggccgagactctcaactataccaagagtattatggtggtctgcaccaattaccaaaactttattcttcatctgactctatttattatatatttcaacatattctttagcaattacattccatgaaccttttcctaatcttgcactctcagctatattctcactcatctgctgaagaaaaacaggattatcaagatatgattgtattgcattggcaagaacatctacatccttaggaggaacaattattcctgtcttaccatcatcaatcatctcagataacccacctacattggtagcaattacaggagtattcagagcaaatgatgaatatactactccactctgtgttgcatcagtataaggacacactgtaaataatgcaccacgaattagatcagcaagttcattaagttctataaatcgattaaaaatctttatataatcatatttctcatactctgaagcatcgaaatacatttctccactacctgcaacaatgacttttacattaggatggactttatgcaccctttccatcgcccgaaaaagatattctatccccttatatggagaaatacgtccaaagaaaagtatataattctcttttttcttgtttacatctccaaacatacgaagcatatcataatatcctaaatgcgatgtgaatattctatctttaggcacattgtatccttttgagaatacatccacttcggctttattgagaacaataaacttcttgacataccactttataatcgaacgacgaatatcctctttcctatcatcttcccctgtatgaggctttccgtcatgaattgtaacgactaatttatttctaaagaaccacaatggcacaaaatggaataatgatggtgtttcaatatattgaattatatcatagttaccctttttaaaaaaggacaaaacattcatcgctagcataaaactactccaaccaaagcggcccactggttcgtttgctatgtaaatattctcaatagggacataagaagaaaatattttcagctcagaataagctgttaacgggaatatgcctcttttaggaataatctgattaatattgaacactgtagattttaaagagcggggggtcatagaatataacacagtcacatcatgaccttgtgctataagtgcttttatcagtggaaaatcacaatcaccaaagcacgtacgagaataataaagtattttcatatttagactcttagcctatttctagtgaaatgataatctgcacaaggaataatcgtcaatagcatcatatacggattaagatagtttgactctaaaagtcccattacgaacaagataattatacacatcctcgatacaagattcgtattacgaaaaagtattatataaaaaagaccgtatagcaaagcaccaatataaccaagagatagtagaatagtttgtacaccattagcgtaaaaaataaaatttccgtcatacatctctattccaaatctgtttcgtgcatcaggaataccaataatctgttcatcaaaagttagctgatcaaacattaaataacctccgacgactcgagtaaaaccactcgctccttcagtagagaattcttcagttcgtaaaagcatctcttgtcccatttcacttccaacatacatgtatattaaagcaataattaatggaacgaacagcataatcattataaaacgtctaataatattcgcattccaaaatatgctgaacattttcacagcaaagagaatcaccagtccgaccattccggaaccagacttcaaagctacgagagagaagatgataagaataccctccttattcaaccacttttcctgtttattagtttcaaaccatatcaaagccagatagctcacatagtaataagccatatatgatggttcaaggaatatcgaacatggacgcggacctgacatctgatgggcaacaagttctgcatacgacatcccctcataagtaaatgcacctgtgagatttggtacaaaacaaaatacatgagaacctgtggctaatttcaaagaaaactgcacccaaaacaaagcagccgaaattagaaccacccatcgcatatatctcttaatcaactgaaaatcaaaagataacacacctcctataagagcaagaaagaataaaaagaaaagccatccacccggaggaatcagagtccataattcaaaatggtgatgatatatccatatcagacaaatatacacaaacaaaagccagaatataataggaaccacattaattttaaaattgtttctaactataatatatgttgacaaaaacaatattaaagtgtaccccaaaccaactggaaatggaatcttataccaagccagtatcggcaacaacgcaagaatcatcatagatgctttgcgaagccatggcttacagttgctttgtatatttatacaagcagaaatcatcgttatttttttaattgattgagaacctgaatcatcatatttgaataactttggtaataccttacagcaaaagccttctccttaacagcatcaaaagacaaaatagcatccatgacagtagatgctgatgtaggagaataatcctgaccagatataaaaactcgatacttcaataaatcagctgcactcagaatatgataaatcttacttgattctccattagtccattgaccgtcaagcttcggaattccgtaattgtcaaaacaatagaacgggacaccattagctatagatgtcacaatcggatgcatattgtttcctacataccctttcgaatacttaatcaaagcataccattctaaaggtgatatagtatcacctgctgtgtattgaatatcgccaaaggcagacgcatcagcataaggcagttttacacatacaagaccatttttattagccaattcttggaattcattaatccaagcctgattcacagatttctctcccttaaaactgagtagaatatagttttcaggaatattgaatttcttaattatttcttctttaaaaggtaccaaatgagatgcattgtgattaaaggcaaagacaggatcaggtgtaacttctggaatcatttctccatcagtaagatatgccaccatcttttgggtccaatcatcacgaacagacatatagcgaaatcccaaaatagactgcttcatccgagacttagttctaccctttatgaaagggtacattgaatcctgagatgaaccggatattaccgcaatcggaaccggatgatccaaatatctattgaatgccccccaaaaactgtttggatacattctgtcactagtaggatgcccaatatatatgattctcttacaagggaaatgaatacgttcacgcaaaggatgatgctgaataacagcatcgctaccaataattacagcctcaattctttccttttcaattacttttgctacttgcttatctgtttcgcaaagttctgtcattggatagtattgttttcttatacgtacatataaatctctaacctttagcagagaccgtttctcgtaatctttactgaaatccttaggaatccaatttatcactataggctcatcaccctgtttcttgatatattcgacagtagaaaggagctgcaaaaatgcgccaaagttacaagctgcatgatatgctaataatcctattttcattttatcgctttagaagatgctgaatttttgatttaatatgctctcgttgaccctcatcaaatgcaaatctgaacattaatacagcaaagagcaaacagtatattgaacatacaattacaagcttcaagaaagaattagacatcacaaagtgaggaatcatcgcaacaataacaggaataactatgattatcatagttggttggataacattctgaatatattctttgacactcatacctgtcaatttattcgccataaacaatcttacacacaaagaaatgagttccagtatcacaaaagctatagttgtataatatacagaataccccatctttaaaatgaaataagctataggaacattcattagtagaagacttcccataattatctgataattacgaatttttcctgttgcctgaatagcagccataattcccactgagtattgatatgttatagataaaagaaggatgtactgagccaacttcaatgtaaatggtgggatatcatcttttagccaaagagtcaaaacttcgttcatctccatgatgaaaggaacggcaaagaacgcaagagcaagtacagagaactttgatgagataaatgatatacgaaaaagtctatttctatcattcattccttcacttttcattaactgaggattaatagccttttgaaatgtagcagaaaaatgtccaagagcaccatttatctgattcgcaaccccatatgctgcatttgctattgtacctaaaaaaatatttataataactgcaacaccttgattccttccaatcattgcaagacctgcaaaaagattccatccagtaaagcctaccatctccttgattatgaattttcctcgatatgtatttaattgtatacaatagtctttgtaagcataccggcaccacccatatttcataaaaaaagtcaaaacagaaataaaggcgacacaagcaccatagtaaatcagcttatccccagaaatgtacgcaatagaaagcgcaacagcaagcatcagtgcagaatcaattaactctatgacagaaaaaggcaacatatcctctttcgcattgaccaaagcatcaaatggaactgatacaatctttgcaaaggtgctaaaaataaggagttgataaataatctttgcacaccacactcgctctggaataatattgagtctatcaatcgcaaataacccaatagtctcaaaagcaacaacaaccagcaagcctaggagtaaatgtaaaagaaaacttgtgttataaatagaattaattttttcttcatttttctctcccatcgcaacagacataaatcgttgggtagagacagtcattgagttattcaaaaatgaaagcatcgccacaactcctgccacaagattgtataaaccatagtcactcgctcccaaggcattcaacaccaacggaatagaaacaaaagcaattgccaaggacaggataaccttaacataaagtacgattgtattaaatattactcttgttgatgtttgcatactttttaatataaatgcgaagtatcatctttaaagtgatagccatactgataacctttacgttcccttttacctatgacttttgcggggactccaccgacaattgtatatggtggaacatccttcgtcacaacagctccggaagctactacagctccttcgccgaccttaactccaggaagtattattgaacgactacaaatccaagcatattctccaatttcggtaagtgctcctttaccacaaaaatatttatcgttataatcgtgattaagcgaccagataacagcctcatatgcaataacagcatttttacgaattataagaccttttcttgcatccaaaagacatttaggaccgatattaaccccatcctcaattattaaacctttaggattcctcactgtgaatccaaagtaaaaatgaacattctttgaagcctttacgccactccatcgaatgaaaagatttctgagagttttacttggaagacttggtataaatctctcaattaatgtgcttttaagtccatttattcctcctcgaatattattgtatatattcctagctaactgtttcatatatagtatttcttatattctctatatttagaattgtcatgtttgtatagcaactatcttacaaagttctatatagtattgagtcccaaaatatttggagagattcttcacaaaatctaacttcaattttgtacttgaaataaaatcttgcacaatccattgctatacatatttttaagctttcaacgaagatatttcttttaatctagagcctgatttgagtacttacaaaatatataaaaacaaatggaatatacagaggagtaacccaatttattgattgcagaaaaaggctattttaatctctaccgaagatatcgcgtgtatacactttcttttctacatcacttaaacactcatcaaaacgattagcaataatggccttgcataattctttaaaacgagtaagatcgttaacaactttggaaccaaagaagttttctccattgctaagtgtaggttcgtaaataatcatttctgctccttttgctttaatacgcttcataatcccctgaatagcgctctgccggaaattatccgaattagacttcatagtcaaacgatacactcctatggtgacaggctccttctggccgtcataaagctggttagtactatagtcgtaccaaccagctttacggaggacagcatctgcaatatagtctttacgagtacggttagactcaacgatagcggacatcatattctgggggacatcagcataattggcaaggagctgcttggtatctttcggcaagcaatagccaccatagccgaatgaaggattgttataatgtgtaccgatgcgtgggtcaagacctacaccttcaatgatagctttagagtcaagacctttcacctcagcataggtgtcgagttcgttaaaatagcttactcggagagcaagataggtattggcgaatagcttcactgcttcggcttctttcatacccataaaaagcgtgtcgatgttttccttgacagccccttcctgcaaaagggcggcaaatgtcctagctgcttcctgtaacatagtgacatccgtgacagaccggatcgccttgttttcttcagcaaactccggacggtcaatgattttcggatagcctacgatgatacgactcggatagaggttgtcataaagagccttgctttcacgaaggaactccggtgagaacaataggttaaacttccttactcctttccgggcgtacttcacataaaggttacgggtatagcctaccggaatcgtagattttatcaccattatggcatcgggattcacttcaagtacaaggtcaataacctcctccacacggctcgtatcgaaataattcttcaccgggtcatagtttgtaggagcggctattaccacaaagtcggcgtcagcgtaggctgatctcccgtccaaagtggcaacaaggtcaagcggcttttcagccagatacttctcaatataatcatcctgaataggggaaaccttgttgttcagtttctccaccttttccgggattacatccacggcagttacatgatgatgttgtgatagcagtgtcgctatgctcagtcccacataaccggttccggctactgcgacccgaatctctttgaaatcacgcatattatgtttgatttggttttatcaatagcagtttatttaccctcccgacttgtatgcttctctccataaccatagccataaccataacgcttaccatagccataatacttgccgtatttaccataaccataataatagccgtacttctttttctgaagatccaagccgttaatggcgatacagaggttaggcagtttgttgttttccataagttcattgatcaaagtaaactctgccttacgggtataatcggcacggcatacgtataccgataaatcagcagtacgacctatcagcaaggtatcagttaccatacccacgggagccgtatccagaatcacataatcaaa
